United States Patent Application Publication US 2023/0058319 A1 - sequence listing, part 2

SEQ ID NO: 3 - DNA, 623929 bp, Bacillus subtilis
gcagtgaataggcccaggcgactgtttagcaaaaacacaggtctctgcgaagccgtaaggcgaagtataggggctgacgcctgcccggtgctggaaggttaagaggagcgcttagcgtaagcgaaggtgcgaattgaagccccagtaaacggcggccgtaactataacggtcctaaggtagcgaaattccttgtcgggtaagttccgacccgcacgaaaggcgcaacgatctgggcactgtctcaacgagagactcggtgaaattatagtacctgtgaagatgcaggttacccgcgacaggacggaaagaccccgtggagctttactgcagcctgatattgaatgttggtacagcttgtacaggataggtaggagccttggaaaccggagcgccagcttcggtggaggcatcggtgggatactaccctggctgtattgaccttctaacccgccgcccttatcgggcggggagacagtgtcaggtgggcagtttgactggggcggtcgcctcctaaaaggtaacggaggcgcccaaaggttccctcagaatggttggaaatcattcgcagagtgtaaaggcacaagggagcttgactgcgagacctacaagtcgagcagggacgaaagtcgggcttagtgatccggtggttccgcatggaagggccatcgctcaacggataaaagctaccccggggataacaggcttatctcccccaagagtccacatcgacggggaggtttggcacctcgatgtcggctcatcgcatcctggggctgtagtcggtcccaagggttgggctgttcgcccattaaagcggtacgcgagctgggttcagaacgtcgtgagacagttcggtccctatccgtcgcgggcgcaggaaatttgagaggagctgtccttagtacgagaggaccgggatggacgcaccgctggtgtaccagttgttctgccaagggcatcgctgggtagctatgtgcggacgggataagtgctgaaagcatctaagcatgaagcccccctcaagatgagatttcccattccgcaaggaagtaagatccctgaaagatgatcaggttgataggtctgaggtggaagtgtggcgacacatggagctgacagatactaatcgatcgaggacttaaccaatttgaatgtatgcttactgttatctagttttgagagaacactctcaatggtttggtggcgatagcgaagaggtcacacccgttcccatgccgaacacggaagttaagctcttcagcgccgatggtagtcgggggtttccccctgtgagagtaggacgccgccaagccattacacgcaagtgtaatatacggaggattagctcagctgggagagcatctgccttacaagcagagggtcggcggttcgagcccgtcatcctccaccattcctatcatacataagttggcgtattaagccggtgtagctcaattggtagagcaactgacttgtaatcagtaggttgggggttcaagtcctcttgccggcaccacctttatatgttatactatataagtctcttgtaataagagccattagctcagttggtagagcatctgacttttaatcagagggtcgaaggttcgagtccttcatggctcaccatgtttttcttgcggatgtggcggaattggcagacgcgctagaatcaggctctagtgtctttacagacgtgggggttcaagtcccttcatccgcattgccaaacgcggaagtagttcagtggtagaacatcaccttgccaaggtgggggtcgcgggttcgaatcccgtcttccgctccaactatactataccatccatgccggggtggtggaattggcagacacacaggacttaaaatcctgcggtaggtgactaccgtgccggttcaagtccggccctcggcacttattgttgcgcccgtagctcaattggatagagcgtttgactacggatcaaaaggttaggggttcgactcctctcgggcgcgccatacatacttttgaaaacgggaagtagctcagcttggtagagcacatggtttgggaccatggggtcgcaggttcgaatcctgtcttcccgaccattttggggccttagctcagctgggagagcgcctgctttgcacgcaggaggtcagcggttcgatcccgctaggctccacttgattttaattgttttttggcggtgtagctcagctggctagagcgtacggttcatacccgtgaggtcgggggttcgatcccctccgccgctaccattggacctttagctcagttggttagagcagacggctcataaccgtccggtcgtaggttcgagtcctacaaggtccaccacttatacggaggaatacccaagtctggctgaagggatcggtcttgaaaaccgacaggggtgtcaaagcccgcgggggttcgaatccctcttcctccgccatatctaatttaattatcatcgcggggtggagcagttcggtagctcgtcgggctcataacccgaaggtcgcaggttcaaatcctgcccccgcaaccaaaaaatggtccggtagttcagttggttagaatgcctgcctgtcacgcaggaggtcgcgggttcgagtcccgtccggaccgccatttataaaaaggctcggtagctcagttggtagagcaacggactgaaaatccgtgtgtcggcggttcgattccgtcccgagccaccatttaatttaatattgttttggcggttgtggcgaagtggttaacgcaccagattgtggctctggcactcgtgggttcgattcccatcaatcgccccaaacaacatgcgggtgtagtttagtggtaaaacctcagccttccaagctgatgtcgtgggttcgattcccatcacccgctccatttttatattgtcatgggcctgtagctcagctggttagagcgcacgcctgataagcgtgaggtcggtggttcgagtccactcaggcccaccatgatgatttttccacagtagctcagtggtagagctatcggctgttaaccgatcggtcgcaggttcgaatcctgcctgtggagccatacggagaagtactcaagtggctgaagaggcgcccctgctaagggtgtaggtcgtgtaagcggcgcgagggttcaaatccctccttctccgccataaggcccgttggtcaagcggttaagacaccgccctttcacggcggtaacacgggttcgaatcccgtacgggtcattaaaaaaaccttgcatactatgcaaggttttttattatgcgttcatagtgtaaatggtaaaagacaagtatgtggcaaaagcgctccataataaataaggaaccagaagccaggctgaagctttactgtatttaccggcaatgagcaacagaatgagtgtagtcacagccacaagcaggcaatcgatagatgcagcaagcaaatttttctgtgtgaattgaaaatagctgaatccttgattcacgatataattgatgagaagcatcacccaaaaagctttggattctttacatgaaaactttgcgtatatcaaggctgctgagagcgaaataagcgcaaacaaaaccgcccatatgatgccgatcactgatccgctcggcgtccagtcaggtttttgcagcgcgtcataccattcccggtcgatgggaaagagaacccccgctaaagaaaacaagacatatgtaatgataaatacaataatcgcaccgatatacttctttttcatttgttccctccgtcattcaatgtcaatacgttagttcccttttttggaaagattaaaccttttaaaaggtttatgcatcattaagtgtatgagttttcagtgtgaaaatgcagcaaaccatttatttgtattcaaaaaccccggcaggccggggttttaatcagcatgaagatcgccaaaggtcgtcataattccttcttcgtccagttcctgttcatatttttcgtgtgctttgcttggatacacggaaatgttttttccggtaatatctgtcgcgataaagttttcataatcctcagcatagccgatgttttcttctgagttcattgtcatatccccatagctgagcggaggatcttctaaatcctgaggcgtttctgagtttccgtattcctcaacatcctgataagcatcttcactatcgtaagccgcccggattgattcatcatcatcaaattcaaactgtccgaacggtgtttcctcttcaatcggcctgtctttggaaacggcatcctgcgaggaatattccgccaatgtcgtagccgtcggcagagcttcgagtctgtcataaggaatgtccttgccgctgacttcacatgtgccgtatgtgccgttttcaatttgcttcagagagtaatcaatatcgcgaaggtgctctcgttcatggtcgagcagagccaggtctttttcccgctcgtataattcggtcgcctgatcgccgggatgattgtcataggaagacaattcgccggatgactgatacgggaattcatcagttaactgaaattggtcattttctttaaagcggctcaaaatatcatgtctggcttcttctaattctttttttaagtgtgtaatctgttcgtttgtaagcacattaatccctcgtttctatgtgatacttactgttagtatgaacgcttttgcgcagaaaaatggtggataaaaatagtcattttcccatgaggaagtaaaagaatacagtgattgccgagagtggggaaagaaaattcaagtttgtttctttattcatttgcgcaaaaaggtttataataagaaatgcaggcattttgtcgtgctcaaatctgtgtgtttgacacaaagtcatcacaggtgtattgtattaaaagcatttaacggattatggaggaatgtctcatggtgacaacggtgcagcatacgttccgagaggaagcagatcatgcattacataaagccaaacaagtcaaccatgctgtcttattgagctattcaagacgtattgcgtctttagaccctctatcatttttcaaagacggagcaaaaaaatataaaggcaaacgatttttttggtcagaacccggtagcgaattaacaatagtcggtcttggcacagaagcgctgttccaatcgaatgaaaaaaatggaaagcgttatcacgacgtttttgaacaatgggagcgctttaaaaagacggcttttcatattcatgaagaagaagaggcggcgcataccgcggtcggccctgtcttattcggcggtttttcatttaatcccgctgaagagagaggagacgaatggaacgggttcgaagaaggactgttctttatcccctcactcatgctgacaaagacggcagatggtgattatttaaccgtcaatcaatgggcggcagacggtaatcaggcagaagatacgctgaaacgtctgaaatctttttcggaagctttttcagtttcttcaatcgagtatgaagaatatcctgttttaacaaaagcggaagaacttgatgtggaaaactggcttgaagccattaaaacagcaacaaatgatatgaaagcaaatcaatatgataaagtcgtgctggcaagggaagtcgttttgtcatatgatgggcctattccggcggagagcgttgtccgcaagcttttgacggaccaaacgacaagctatgtttttgcgattgagcagggagataaatgctttgtcggcgcttcaccggaacggctgatcaaaaaatccggcaaagacgtcatgtctacctgcctggcaggttctattaagcgcggagaaagtcaacaagaagatgaccgtctcggcaaagagctgctgcatgacgaaaaaaatctcgcggaacatgattttgtggttcagatgatacacgattctttcttgtcgagctgcagcgatgtgaaaaagcctgcaggtccgcaattatataaaacaaaaagtgttcagcatctatatacaccgatcacaggccatcttaaaacgtccgcttccctgtttgatttaattgaaaagctgcatcccacaccggcattgggcggagctccccagcagaaagctgttgaagttatcgctgatattgaaccgatgacacgcggatggtacgcggccccgatcggctggatggacggcagggaaaacggagaatttgtcgtggctatccgatcagggctgattgaaggcaaaagtgcgcggcttttcgcaggctgcggcattgttgaagattcagatccgcaatcagaatatgaagaaacacaaattaaactaaagccgatgatctctgctttaggaggtgaaaggctttgacaaacccgattacacattatatcggaagctttattgatgaattcgccctatcgggtgtcaccgacgcggttgtttgcccgggatcgaggtcaactcccttggcggttttggcggcggcccacccggatattcaagtccatatacagattgatgaacgatccgcaggttttttcgcactcggtcttgcaaaagcccgccagcgtccggtcatgctgatttgtacgtcaggaacggcggcggctaacttctatccggccgtgattgaagctcattattcaagagtgcctcttattgtcctgactgctgaccggcctcatgaattgagggaagtgggggcgcctcaggcgattaaccagcattttctgttcggtaactttgttaagtttttcacagactcggctctgcctgaggaaaatcctcaaatgctgagctatatcagaacattggccggcagagccgtaagtgaagccgggaagcgcccgatggggccggtccatatcaatgtgccgctcagagagcctttgatgccggatttatcagccgcaccttttgaaagaatgagaaaggggcggcacgtctcagtcacaacagggattcagtcagctgctcaagactctctctgtcatattacagagcgtctcgcgggtaccgaaagaggtatgatcgtctgcggcgaaatttacggtgaagcagaaaagcagcaaatcatcgcgcttgccgagatacttcagttcccgattttggctgatccgctttcaaatctccgaaacggggagcatgataagacgctgattattgatgcttatgactcgtttttaaaagatgaagaaataaaagaggcgctgcgtccggacgctgtgatccgcttcggcccgatgccggtttccaaaccgctctttttatggctcagagatgatcctgccattgagcagtttatcgtcgatgaagacggaggatggagagatcccacccaggccggcgcgcatatgattcattgccatccgtctgtgtttttggaagcggtccgttcagctgaaatcggaaaacggctgtccggatggcttgagaaatggcagtttgtcaatgagcggttccggagtcatttacaggccgcgagcatggatgatttatcatttgaaggaaatgtatatcgtcagcttcagcaccttgtccctgaaggcagttcgatttttgtcggcaacagcatgccgattcgcgacgtggatacgttctttgaaaaacaagatcgttccttccgtgtttatgccaaccgcggcgctaacggaattgacggagttgtctcctcggctatgggactgtgtgaaggtacaaaagctcctgtcacgcttgtcattggagatttatcgttttaccatgatttaaacgggctgttagcggctaaaaaacttggaattccgcttacggttattttaataaacaatgatggcggcgggattttctcgtttttgccgcaggcatctgataagactcattttgaagaactgttcggtacgccgacgggccttgatttccagcatgccgccgcactgtacggcgggacgtatacttgccctgagacatgggaggcatttaaggatgcgtatcagccgcaggcggacaagcccggacttcatataatcgagctgaaaacagatcggacatcaagagttcaattccatcgcgatctgctgcaggccgcagtgcgggaagtgaaaaaagaatggaaactgtaacagttaaaacggccgacggcgtatgctatcgtgctgctgatagcggacacgaatcatccgaagctattgtttgtctgcatggatttacgggcagcaaagaatcatggatgtttttacgcggcatgtttcccggcgaacgaatggtgatgattgactgcctgggtcacggggagacagacgcgcctgtgcaagcggcaaggtacagtgcgagccggcaggttgcggaccttgccgccgtttttgatcaattaaaacttcacaaagtgaaacttattggttattctatggggggaagacttgcgtattcctttgcacaggcatttccgcatcgggtgtcagcgcttgttttggaaagtacaaccccgggcctcagcacgcttcaggaacgtaaaaagcggattcagtcagaccggaagcttgctgactttatattgcgggaaggtataacatcttttgttgattattgggagggcattccgttgtttgccacgcagctttctctgtcggacagcgtaaaggcgtccatccgtgccggcaggctgaaaaataatccgtccggacttgcaggcagcctgctcggaatggggacgggctcacagccttcctggtgggaggcattacaccacatcaaggcgcccgttctgctcatatgcggagaatgggatgaaaagttttgcgttattaatcaaaaggtgcataacctgctcccatcaagtaaaatagaggttgtcaaacaggcggggcacacggtacatgtggaacagccgcgaatttttggtaagatagtaagtgagtttttatacggcttgtaaagcataaagaaaatagcttttcggccggactcaggcaaaaatgaaggaggtcatatcaatggctgcagaatggaaaagtgaacgtcagtacgatgaaatcctgtacgagacgtataacggtattgcaaaaataacaattaaccgcccggaggtacataacgcatttactcctaagacggtatcagaaatgattgacgcgtttgctcgtgcgcgtgatgactccaatattggtgtcatcgttcttgcgggagcgggagataaagcattctgttcaggcggagaccaaaaagtccgcggtcacggcggatatgtcggagacgatcagatcccgcgtctgaatgtgcttgatcttcagcgtttgatccgtgttattcctaaaccggtcgtagcgatggtatcaggctatgccatcggcggaggccatgtgcttcatgtcgtctgtgatttaacgattgcggccgataacgcgattttcggccaaaccggaccgaaagtgggaagctttgatgcaggttacggctcaggttacctggcacgtatcgtcggacataagaaagcccgtgaaatctggtacttgtgccgtcaatacaacgcgcaggaagcgctcgacatggggcttgtcaatacagttgtcccattagagaaacttgaagaggaaacaattaaatggtgtgaagaaatgcttgagaaaagccctacagcccttcgtttccttaaagcggcatttaacgctgatacagacggcctcgccggaattcagcaatttgcaggagatgcaacgcttctttattacacgactgacgaagcgaaagaaggccgcgattcctttaaagagaaacgcagtcccgatttcggtcaattccctcgttttccgtgatcagatgacactacgaaacagcttgagccgctctggtccaagctgttttcttttcaaaaacagtacttttacctcggagatgataacatgctgacagaacagccgaattggctcattcaaagggctcagctgacaccagagagaatcgctctcatatttgaaaacaaacagatgacattcagagaattatatcatgcttctaaacaaatggccgcgcggctgtccaaatactgctcgcttaaaaaaggagaccgggccgcgattttgctttctaacagaccggaaatggtttatgccgttcacgcctgtttcttattaggggcggaagctgtgctgttgaatacgaagctctcaaaacaggaacggatgtttcagctcaaagattcacaggctaagcttttattgacggaggacggtttttgccgtgaagaatatgaatctgcggtcgccaccgcggacgtggacgagctgcaggccaaagccgcgggagacattgaacctgaagcttatgtaacgcttgatgatacggcgactcttatgtatacgtcaggaacaacgggaaggccgaagggggtgcagcagactttcggtaatcattattccagcgctgtatcgtctgcgctgaatctgggggtcacggagcgggaccgctggcttattgcgctgccgctgtttcatatcagcggtctgtctgcgctgtttaagtcggtcatttacggcatgcctgtcgtgcttcatcaaaaattttctgtcactgatgtgctggacagcatcagctcccatcaggtcacgatcatttcagcggtgcagaccatgctttcgggcctgcttgcggaaactgaacaatgtcctgaatcactgcgctgcattctgcttggcgggggtccggcaccgctgccgctccttgaagaatgccgcaggaaacaatttccggtattccaatcttacggcttgactgaaacctgctcacagattgtcacgctttctccggaattcagcatggacaagctcggctcggccggtaaaccgctgttttcatgcgaaattagaattgaaaaagacggaaacccttgtgcgccgtttgaacatggtgaaattacggtgaaaggcccgaatgtaatgaaagggtattaccatcgtgatgacgcaaaccaggccgcttttcataatggatggtttaaaacgggcgatcttggatatttggatgatgaagggtttttatacgtgctggacaggcggtcggacctcattatttcaggcggagagaacatctacccggcagaagtggaagcggcgctgcttgcccatccggctgtagcggaggccggtgtttcgggagccgaagatccgaagtgggggaaagtgccgcatgcttttctcgtgctgacttcttctgtcagttctgaggagctgaccgccttttgccgtgagcggcttgcaaaatataaaataccggctgcttttttcgaggttgacggactcccgcggaacgcgtccaataaactgatgaggcatcggctgaatgagcttcgtaaaggagaattgtcatgattaagattgaaaaaatcaccctttatcatgtaagtatgaggctgaaaaaaccgtttaaaacaagtattgaaacgctgcaggatcgtaaatttttgatcgtggaagcgatcgatgaaaccgggagaaccggctggggggaggtatcggcgttttcttctccgtggtatacagaagaaacgattcagacatgcgcgcatatgctgagagattttttcatcccaaatgtcgtaggccgcgagtttttccatccgtcagaagtgcctgacagtctcgcgcgtttcaaaggaaaccgcatggcaaaagcggggcttgaatcagccgtgtgggatctatatgccaagaaaaaggggatatctctcgcagaagccttagggggcaaaagagataaagtgcccgccggcgtggcggtgggtctggcttcggctgatgagatgcttcgggaaattgagcaatacgtaaaagaaggttatcaacgtataaaaataaaaattcagcccggccatgacgttgatctggtcagatccatccgcagccgttttccgaacgtaccgctgatggcggatgccaactcggcatatgaactgaaagacatcagcaggctgaaagagttggatgaattccagctcatgatgatagaacagccgcttcaggcagatgatattgtcgatcaccgccacctgcagaaacacttgagaaccgcggtatgccttgatgaaagcatatgctcatatgatgacgcgaggcgggcgattgagcttgggagctgtaaaatcattaacataaaaccggcgcgtgtaggaggcctgacagaggctttaaaaatacatgacttatgcagagagcatcacatgccggtttggtgcggcggaatgtttgaaaccggcatttcgagagcgcagacagtcgcgcttgcttcgctgccgcaatttacgataccgggtgatatttcctcatcagaccgatactgggaggaggatattgtcactcccgacatacgtatcgaagagggattcatctctgttccggacggccccggactgggtgttgaagtcaatcaggaaataatgagaaaatacgtcacccaaatggacgtttttacgacaaacaattgataaaaagacatttcagcgagttgagctgcctgtatgctgctgttatattgaaactgttcatcatcaccccttcccccgtttgaaccggctgtatcagccggtttttttaatgggcgaatgcgatgatttttttattcttcaaacagtgtcggctttacatcgcaggtgttgctttctggctggggcaaacatgtacatcttgataaaaaattctgtgcttgtcatgaatgcgatactgatcgtaccgtctgccgcctatactgacaaaccgcctttcttccatgcttttcatcagcgcgattttccccggctcaggggctgatttcaaaaaggcttgcggcgcggaaatgaaaaagagctgtataaaacagctcttttcttttataaatcatgcggtttaaaggttttgcaatccgtttcttcacttttttcagcggtttcgcctgtatggctgaccacataaatcgcgtcggccgtgcatttgtttcctctgccccaatatgaacagttattgacttcacacagaattttttggtccatgctggctcccctccaagataaaaggtacgccattagtatgagccgccctgatttttgttattcctcctggcggatataacgtctgtctttcataaagagcttccagaagaaataaaacccgggaaacaaaatgatgaaagcgacgatatacgtcataaacagcgccctgaaggtggccggctccgtaaatcctgacatgaccgtaatatcaggataaatcatataaggaagatgcgcccgtccgtatgcatagcttgccagaaagtattgaagcgcaatggcgatcatggcgattcttggtttgccgaggttgcggccgaagcgtttattcggcaaaaacagggccgcgccggcaatgaaaaacatgataacagacaggataagccatgtcttgtctttcatcatccccgtatacagccagccggcttcgtttcgtaatgtcagcataatgaagaaggcaaatagaagcgaaagcggccctgttagtaaagaactccgtctgtagatgcggtacgcatgctcctcttccgcaacatttgaaaaatcggccagaagcagtgaagataaaaataaagtgcttaaaatggcaaagccgataaacgcatacgcattaaggcttgtaaagacatttgccaaattcagttgatacactccgcccgtcttctcaataaatcctccgtgtgtgaccggaaggaccaaaatcagcacagcgggaataatgaagcccgaaattccggagatatatctcatgatttttctttccttcgccgtattggagaagacgagaaagccgctgcggatggctaaaagcagcaaaataatactccccgggatcaataaaacggttcccagcacgaaggttgcccctggaaagaagctgaatagggcgacaacgattgcgacgataaagacgttggtcacttcccatgtcggggacaaataacggttggcgatgtttgtcgcctttgtttgttctttatttaaataaatcatcgaccaaaagccggctccgaagtccatcgttgccatgaccgcgtagataaacacgaagccccatacgattgatatcgcaatgagagcatccatggtaatgtccattttaattcagccctttctatagttaggattccgccgcttttacatcctcctcaacgggatgtttgcggaaataataaagcagcacataaatgactgcggctgccaaaatggcgtaaacgaccgtaaacaggatgaacagcaaaccgattgaaccggttgtcgtgacgacatcagacgttttcaagagatggtaaatcacccatggctgccgccccgtacaagcgaatatccacccgaattcaattccgatcagactgagcggtcctgcggttaaaaataaaatcaaaagccaagtcggaaagctgtctttctttaaaatttttctccacacgatgccgatgattgagtacaaaatgagcagcattccaatgccgaccattccgttaaacagtgtatggatgaataaaggcggccactcgtctttcggaaacgcgttcaatcctttgacgacggtatcaaagctgtttgcagccaaaaagcttaaagcccatggcacttctatcgcccattttactttttcttcttttgcatcagtaaaacccccgatcgcaagcggagcgtgtgatctagtttcaaagagcccttctgcgcccgcaagcttctcaggctggtattcgtaaagaagctgggctgactcgtgaccgtttaaagaggcaagaatggaaaagattccgccgatcgttaaggcgagcagcagcgcttttcggtgaaagcggtatacctgctcctgttttctcgttctcagcattttataagccgcaactgacgcaacgataaatgccccggtcatgaaagccgtcagaacgacatggcccgcggtggtgaaaaagcttggattaaaaaacgctgcccaaggttcgacgtcagtgattttgccgtttaaaattttaaagccggccggcgttccttcaaatgcgtgaacatttgtgattaagacggcggatgccgcggcgccgatcaaaacgaaaattacggcaatgatgcgcatcgccggagtcagccggtcagcggcgtagacataaattgacataaacagcgcttcgataaagaatgcataaatttcaatctgaaacgggagggacatcaccctgccgatgacttccataaatccgggccacaaaagggcaagctgtgtacccgcgatcgttccggtcggtatcgccacgccgagcagaacagcctgcgccttcgtccaccttttcgccataatggcataatgcggatcttttgttttttgataaatcaattcagccattaaaatcatcagaggcaagccgacaccaagcgtcgcaaaaataatatgaaagcccatggttgtcccgaacaggcttctggctaatactaaatcatccacgatcataaaccgcctttctaaattaccgttttatgtaatgtggttatattatttgctgaagcgattagattattcttccgattccatatatgtgcagggtttagaaatcaagggatcagggcatatatgattgacaagcggttatttaaggtttaaaataaaacgtaataattacgatttgagaaagggagatcagcatgaaaaaagatattcatccggataaccatcaagtgatttttcaagatgtgaacagcggctatcgctttttaagccattctacgaaaacgtcagcggaaacggcagagtgggaagacggaaaaacatacccgctgattaaagtagaagtcagctcagatacgcatccgttttatacaggccgccaaaagttcaacgaaaaaggcgggagagtcgaacagttcaacaaaaaatacaatatgggaaaataagacaagcccaatggggtttgtcttatttattgagcactttgtcatctcgtgcggggagtgacgaaatgacccgtcttatgttatattgtgaataaaaaagcagaaaggaaacaccaagatgagtcttctaaacgatatcatgcaatttaatgagcagttcactaaaaacaaagattatgaaaaataccaaacatctaaattcccggataaaaaaatggcgattttgtcctgtatggacacacgtcttgtagaattgcttccgcatgcgatgaatatgcgaaacggcgatgtgaaaattattaaaagtgccggcgcgcttgtcgcccacccgttcggaagtatcatgcgcagccttttagtggccgtatacgaattaaacgccgatgaagtctgcgttatcggccaccatgattgcggcatgagcaaaatcaacagcgaggatatgctcgataaaattatcgaccgcggtattccgaaagagcggattgacatgctgaagcactcaggagttgatcttgatcaatggctgaaaagctttgattcagtagaagcgagtgttacagacagcgtaaacgtcattaaacaccatccgctattccctgacaatgtgccggtgcacggtctggtgattgatcctgaaaccggtaaacttgatctggtgatcgacggctaccagcatatggactaatgtttttgttttttgtccggtacgggatcaacaccgcccggatgaaaagggtggcactttaaaatccgcttcagtgtcagccatccgccttttaatgcgccgtgagtcttgacggcttcgattccgtactgcgaacacgtcggataaaagcggcatgacggcggcgtcagcggagagatgaacttctggtatccgcgaattaaagcaatcattatggttttcatcaaaaaaaccacctttctgatgctagtatagaaaaaaaatttcagattgaaaagcttccgcctcaattcttatcggaaaactgtgttataatggatgcatattctgaaaaaagggagtgccattatgccttcagtagaaagttttgagcttgaccataatgcggttgtggctccgtatgtaagacattgcggagtgcataaagtcggaacagacggcgtcgtgaataagtttgacattcgcttctgccagccgaacaaacaggcgatgaagccggatacgattcatacgcttgagcacttgcttgcgtttacgattcgcacacattctgagaaatacgatcacttcgacatcatagatatctcaccgatgggctgccagacaggctattatcttgttgtcagcggcgagccgacagcggaagaaattgtagacctgcttgacgctacgctgaaagaagccatcgatattacggagattccggcggccaacgaaaaacagtgcggccaggcgaaacttcatgatttagaaggcgcgaaacgtctgatgcgtttctggctgtcacaagataaagaagatttgctgaaagtgttcggataaaaaacaggcctttttgctgacatgcaaaaaggcttttttacatatttctaaaaaatgtcacaccttatgtgtaagcgtttgctaaaatagaagcaaacatgaaggagtgatgggatgaaacgggctgtattggcaggtatgtgcggtatggtatttctattatcttcctgcgggggcaattcggacaaaacctccgcggatgaagagcctaaagcgcttgaggtcaagcttacaggaccggaaacggcagcaccgcatgaaaaagcggaatacaaggcggaagttttttacggcggcaagcgtgtcacggatgcggatgaagtcatgtttgaagtatggaaagaaggaaaaaaaggcagcagcaaaacaagcaaggccaaggaggaaaaaggggcgtatcacctgcggactgaatttgatgaagagggtgtgtataccgttcaatcccacgtaacggcaaaacagcagcataatatgccgactgtaaaagtgcgtgtcgggaatgctgaagctgccgatgattcctccggccatgaggaacagacgcatcatcattaaggattttttttatccgtcaagccttttgatgcgtcctccggcgggtcaatcgtatgttttacattataagctcttacagtcgaccagatggataaaagcagcacggcgagcacgataagaaagccgaagctcagaagaagcagcatgaaatccctcctttttaacaaatcataacatattttccatccgtaaaatcaagggctaaaaatttatgttttaacacacgatatatagggtatatcaatagtaaaccaaaggaggaagataggcatgtcagaaaaactattggatgcagtcaataagcaagttgcaaactggacggtcatgtacgtgaaattacataactatcattggtacgtcaaagggaaggactttttcacattgcatgaaaagttcgaggagctgtataacgaaacggctacatatattgatgatctggcagaacgtctgctggcattaaacggcaagccgatcggcacaatgacggaatcattgaagacagcgtctgtaaaagaagcggaaggcaatgagagcgcagaacaaatggtacagaacatttatgatgatttcactgtcattgcggaagagctgaaaagcggcatggatctcgcagatgaggtaggagacgaaacgaccggtgatatgctgcttgccattcaccagaatatcgaaaaacataactggatgctgaaagcgtatttgggataatcaacaagggaagaccggggctataaagcactcggtcttttatttggctgccgaagagaggtgttgtccatttttctgaaaaatccagtccgttccattcacttttcatagaataatgtaaggccgtttctgtgaaaggatgttggatcaagtgggcaaagactttggcatcttttcgttttttgcagtgatcgtgtcggcagcggggtttttcttcggaggttttcagtattcgtttctgattttgctatcggtcatggcgattgagtttatcagtacaagcttaaaagaatctcttttgcagcagctgagcgcaagaaagctttttgcgcggctggtcaaaaaaatcgtgaccctggcattagtctcagtttgccatttttttgaccagctgcttcataccgaaggcgccatccgtaatttggctatcatgttttatatcttatacgaatcggttcagatcgtgattacggcaagctcgctgggcataccggttccgcaggtgctcgtcgacctattggatactttgaaaaataaattcaagcgcaaaccgtaacatttgcttcaaaggaggctatactagcgggtatgatggttttcctctgaatttttgataaagggcttccgaacaaacgcaactgtggtatgatgtatggaagatatgaaggaacggattagagggataaacatgtacgagtttaaagactattatcagaacactgttcagctctcctttgaacaccagcctttttcagacagcccgaagcacgtatgggtcatatgccgatatggagataagtggcttttgactgagcacgaagaccgggggtttgaatttccgggcggaaaagtggagccgatggaatgtgcggaggaagcggccctgcgcgaggtgaaagaagaaaccggcgccgcggtaagacatctgaagtacgtcggacagtataaagttctcggcagggaaaaggtaatcgtgaagaatatttattttgccgatattgaaaagcttgaacaacaggctgactattttgaaacaaaggggccggtgctgttcagcgaactgccggagaatctcccgcgaaataaaaaattcagtttcattatgaaagattcggtgcttccgatcagtctgaaaaagctgaaagaggacggcgtatttcaatcataaaaacgaagacccggcgtttacgcacgggtcttttttaaatttttcctttcgtccattttctttctaacagttcgactccctgatacatcaatgtcgcaaaaatcgcgatgatcagaaggcttaagaacacaagagtgaaattgaagacctggaatccgtaaatgatcatgtagcccagacctttttcggaaacgagaaactcgccgacgatgacaccgacccaggataaaccgacgttcactttaagcgcggaaatgatcgcgggggagcatgccggcagaatgacttctttaaacatgatgcttcttttcgctccgaaggttttcatcactttaatatagttttcatccacttcctgaaaagccgtaaagacgacgattgtcgtgataatgacactgatgactgctcccatggcgacaatgcttgtgaaattcggtccgagtgccacgatgagaatcggtccgagtgcgaccttcggcatcgcgtttaaaatgacgaggtacgggtctaaaacccgggcgagcctgtttgaccaccataacagagcggcgaggcatgtgccgaggagcgtgccgagcaaaaagccgagaacggtttctcctaaggttacgccgatgtgcgccgcaagggatccgtccgcaatcttttcaactaaaagcctgcaaacggcggagggtgagctgaagattaacggatcgatccagcccgccctgctcgatatttcccagccggcaaaaaatacgatgaaaatggcggcctgatacgcacggatccggagcttttctttttggtgtcttttcttaaactgctgatgaagctgttcaatcgtgccgctgctgtttttcaagggaattcagctccttccatatggtttgaaacagcggctgaaaggccggatcctgacgcgcgtcaaacggatctaaagccgcgagctccttaggcacggtgaatatttggtggatggtgcccggctgattcgaaaataaatagatcgtatcgctcatggcgatggcttcaccgatatcgtgggtgacgagcacggcggttttttgaaaatcctttaatgttctgaagacaagattttccaaagaaagcttcgtttgaaagtccagcgcggaaaacggttcatcaaggagcagcagtcccgggtccggcgcaagagttctggcaagtgccgcccgctgccgcatcccgcctgacagctctttcgggtatttcttttcaacgccgattaatccgagcttaggcagaaggctgagaacttcagctcttttttcttctgttaatgtttttgaaatgtgtaaaccgagcagcacgttttcctcaattgatttccaaggaaataaataatcctgctgaagcatataaccgatttggtgttctttatggttcggcacacttccttcaatcagcacccggccttgcgcaggagtaataaggccggccagaatggacaggagtgttgtttttccgcatccgctcggtccgagaaaggagatgaaatcccctttttcaatctgaaaatgtatatctttcacggcggttgtcttttctttcagcgagaaataagtatgtgttacatgatccacatgtaaaaaagacattcatgttcctcctattgttctgaggtgacttttttggcgatttttgtgttgacgagtttgctgtacggaatgtgtttcgggagctctccggcttcatccataatagattgaagctgttcccattcatccttttgcagaactgggtctgaagagaatgacttttgttttttatatcgctctattgatgtttcgataatggccggatcggtatcggcaaattccttctgaatcgtttttgcgatgtctttggccggatggctttccacccattgctgggcgcgatagatggcgcgggtgaatttttccgccgtcttttcattggttttcaaataactttcttttgccataaaggttgtgtatggcatttggccggaagcttctccgaaggatgcgacgatatggccgatgccttctttttcaaattgggatgccgtcggttcaaacagctgcacataatcacccgttccggatgcgaatgcgttggaaatattggcgaaatcaatgttttgaacgaggttaatgtcttttttcggctctatgtgattctttttcaggacgtactcaccggccatttggggcatgccgccttttcgctggccgagaaatgtttttccttttaaatcgttccatttgaatgatttctcatccttccgtgacacgagaaatgtgccgtccgtctgtgtcagctgtgcgaagttgatgaccggatcttttgctccctgcgcctccacgtaaatggatgtttcagaaccgaccagcgcgatatcagacccgtttgataaaagcgatgtcattgttttgtctccgccccatgttgtttgaagtgacacttggagcccttcttttttaaagaaaccttttgcttcagcgacatacagaggcgtatagaagatggagtgtgtgacttccgccacctttacctttgtcagactttcttcctgtctgcaagccggaagaatgagcaggaaaaaggcgcatatgacaaaaacgcagcccgttttgagccatttgttcacggtgtaacctccttgttttaagcgttaaaataaccttttctgctttacatatcgtatgatgggtataaaaaatgtgtgagtgcccatattcacgttgggaaagaataaaaaaactgatgatataaggaggctcattgttttgctggtagaaaagaaaaggttcccgtctccgagtccgcatgtccgcctctttgcggtgtgctatgagtcagaaggactgaaggtaaaggggctccttgccgagcctgcggcgccgggaacatatgacggttttttatatttgcgcggcggcataaaaaatgtcggcatggtacgccccggaagagtcgttcaatttgcttcccaaggctttgtcgtgtttgcgccttattacagaggcaaccagggcggcgagggaaatgaagattttgcgggagaggacagagaggacgcgttttccgctttccgcctgcttcgggagcatccgaacgtcagggaagggcgggtgcatattttcggtttttcccggggcggtatcatggggcttttgaccgcgattgaaatggggcatcaagcggcttcgctcgtatcatggggcggtgtgagcgatatggtgcttacttatgaagagcggaaggatatgcggcggatgatgaagcgggtgatcgggggcacgccgaaaaaggtgccggatgaatacagatggcgttcgccgtttgaaaaagcagaccgcattcaggcccctgtgctgctcatccatggagagaatgatgagaatgtttcgatcgaacacgcccgaatgatcgaggacaagctgaaagaggcggggaaaccggtggaaacttggtattacagcggttttacgcattattttccgccgcaggaaaacagacgcattgtccggcggctggcggaatggatgaagacacggtaagatgcctgatttatgatatgataataaagaataagagaatgaaaggggattttcattttgggaatgcctgttgaatttaataccatgattgtgacaaaaggcaatgaaaaaaggatagaggaaaatatctttttattggagaaagagggctaccgcgtctatcctcttgatattccgatggacgtgcgcaaaacgaaaaccggcgagaaatccggcaccggcgaggtccagaagctcgaatgggcgaacggccggacaagcattacatacagactcacgtcgcttcattcgacaaactgaaaaaacaaaagccgagggcataaacgcccttggcttttttgattacacgagaggtccgccggctttggcaatcgagtccgcatgggaaaactttttaaagttttctttaaactcattggctaaaaacagcgctttttcgttgtatgcctgtttatcgctccacgtgttttcaggctgaagaacttcatccggcacgcccggaacatgaacgggactgcgcaggccgaaaatgctgtctgccgtcatgtcagtctggttcagtctgccttcaatagcggccttgaccatcgctcttgtatacgaaagtttcatccgttctccgactccgtaccctccgccggtccagcctgtgttgaccaagaagacttgaacgccgtgttcatcgattttatgcccgagcatttcggcatatacatgcgccggaagcggaaggaacggtgaaccgaagcacgtcgagaaagtcgtttgcggagatgtcacgccgcgctcggttcccgcgagtttactggtgtacccgcttaagaagtgatacatcgcctgttccttcgtcagtttgctgatcggaggaagcacgccgaatgcgtccgccgttaaaaagacgatcgcctgcggatggccggcaatgctcggctgcacgatattgccgatcatctcaatcggatatgcggctcttgtgttttccgtgtagaaggaattgccgtaatcagcttcacccgttttttcatcaagcacgacattctcaagaacagacccgaagcggatcgcacgaaaaatctgcggttctttttcctcgctcagattgatacatttagcgtaacatccgccttcaatgttgaaaacgccggaatctgaccagccgtgctcgtcatcgccgatcagtttgcggtccgcatcggctgaaagcgtcgttttccctgtgccggaaaggccgaaaaacagggcgacatcgcctttttcaccgacattggctgagcagtgcatcggcagtatatcctgctgcggaagcaggaagttcataatggagaatattgattttttcatttctccggcgtattcggtgcctccgattaaaatgacgcgcttttcgaaagagacaatgataaatgtttccgaatgcgtgccgtccgtctccggatctgctttaaaatgcggagctgagagaatggtgaaaggctgcgcttgcctgtctctttcatccgtctccggtctgataaacagctggcgcgcgaataaattgtgccacgcaaattcatttacgaccgtaatcgggagtctgtatttttcatccgctcccgcgaatccttcaaacacaaacagttcatcccgctgttttaagtagctgacgactttggcgtacagcttttcaaatgcctcttcagaaatgggctgattcaccgcgccccaatcaatttgattttctgtgctttgttcacggacgataaatttatctttaggtgaccggcctgtatatgcgccggtggtggcgcgtacggcgcccgttgatgtcagcgttccttcatttcggctgatcactttttcggtaagttttggagccgataaattatgatgcacattcggacttgcaagtaatgcttgaagatctgcggttaaatcaactaatttcataaaaaccttcctttgccggtttatttgtatttcgctgaatgtggaattagtataacatatatctgaaaatagtctatactatttgcggttttttgtttgtgtttttccattgcttcccgaaataaaggcgcgtaatcgctttaattcatattgacactttccgcccttttacgataagatatttcattgagcggatactcttatcccgagctggcggagggacaggcccgatgaagcccagcaaccggtttctctgtaaaaaagcaggtgaaaacactgtgggaaaccaaggtgctaacctgatgcaaggtttaatattttccttgagcgataagagtgaaaggcacacagaccaaaccctttcctcgagtggaaaaggtttttttatttcataaaatatgccaattaacattctctgatatagtatgacattgtattaagagggagcgagttccgtatcatatgaaaaggtcttgcaaaagatcttttttcaggaggaaaagtgaatgagtaaaaaccgtcgactatttacatctgaatctgttactgagggtcatccggacaaaatctgtgaccaaatttctgacagtatcttagatgagattttaaaaaatgacccgaacgcgcgcgtagcctgcgaaacatctgtaacgacaggacttgtgctggtaagcggagagattactacatcaacatacgttgacattccgaaaacagtccgtgaaacgattaaagaaatcggctacacacgcgccaaatatggatttgatgcggagacttgcgctgttttaacatcaattgatgaacagtctgcggatatcgcaatgggtgtcgatcaggctcttgaagcgcgtgaaggcacaatgagcgatgctgaaatcgaagcaatcggagcgggagaccaaggcctgatgttcggttatgcgtgtaacgaaacgaaagagcttatgccgcttccgatctctttggcgcataaattagcccgccgtttgagcgaagtccgcaaagaagacattcttccgtaccttcgccctgacggcaaaacgcaagttaccgttgaatatgatgaaaacaacaagccggtccgcatcgacgcgatcgtcatttcaactcagcaccacccggaaattacgcttgagcagattcagcgcaatctgaaagagcatgtcattaatcctgtcgtgcctgaggaactgatcgatgaagaaacaaaatacttcatcaaccctacgggacgtttcgtaatcggcggacctcaaggtgatgcgggtctgaccggccgtaaaatcatcgttgacacatacggcggatatgcacgccacggcggcggcgcattctccggtaaggatgcgacgaaggtagaccgttctgcggcatacgctgcgagatacgtagcgaaaaacatcgtggcagcaggtcttgctgattcttgtgaagtgcagcttgcatacgcaatcggcgtggcacagcctgtttctatttctatcaatacatttgatacaggaaaagcttctgaagaaaaactgatcgaagtcgtacggaataacttcgacctgagacctgccggcattattaaaatgcttgatctgcgccgcccgatctataagcagacagctgcttacggccacttcggacgtcatgatgtggaccttccttgggagcgtactgacaaggcggatgcgcttcgcaaagaagcactaggagaataattttatagccgcttacttaagcggctttccctttttgtagatgctgccatgcttattttttacatagcgtgaaaccaatggcgtaacaaagcgtctataaaaagggggtccaattagaaaattacacttatggaggctatactatgtgtggatttgtcggtgtttttaataagcatccattaactcaaaccgcagatcaagaagagctaatcaaacaaatgaaccaaatgatcgttcaccgcggtcctgacagcgatgggtattatcatgacgagcacgtcggattcggcttcagacggctcagtattattgacgtagaaaacggcggacagcctttatcatatgaagacgaaaaatattggatcatttttaacggcgaaatctataactacattgaattgagagaagagcttgaagcgaaaggctacactttcaatacagattccgataccgaagtgctccttgcgacataccgtcattataaagaagaagctgcttcaaagcttcgcggaatgtttgcgtttttaatctggaacaaagctgaccgcgtcatgtacggcgcgagagacccgttcggcattaaaccgctgtattacacaaccatcggggacaaagtatattttgcatctgaaagaaaaagtttaatggccgctcaaaacggcattgatcttgatacagcttctttacagcaatatatgtctttccaattcgttcctgaaccgagcacgcttgacgctgaagtgaaaaaagtcgagccgggcagccagtttacgatccgcccggaaggcgacatcgcgtttaaaacatatttcaaagcgaacttcaagcctgttcagtctgatgaagataaattggtgaaagaagtcagagacgcaatctttgactctgtcaaagtccacatgagaagtgacgtgcctgtcggttcgtttctatccggcggtatcgactcttcttttatcgtctcagttgcgaaagaatttcacccgagccttaaaacattttccgtcggttttgagcagcagggcttcagtgaggttgacgtagcgaaggaaacggctgccgcgctcggaattgaaaacatcagcaaagtcatttctcctgaggagtatatgaacgagcttccgaaaatcgtctggcactttgatgacccgcttgcagatccggcggcgattcctttgtactttgtcgcgaaagaagcgaaaaaacatgtaacggtcgcgttatccggggaaggcgcggacgagctgttcggcgggtacaatatttaccgcgaaccgctatcgcttaaaccgtttgaacgcattccgtccggtctgaaaaaaatgcttcttcatgtggcgtccgtcatgcctgaaggaatgagagggaaaagcctcttagtccgcggctgcacaccgcttgaggagcgttatatcggtaatgcgaagatttttgaagagcccgtgaaaaaacagctgctcaaacattacaatccagagctttcataccgtgatgtcacgaagccgtactttacggaaagccgttcatacagcgacattaataaaatgcagtatgttgacatccatacgtggatgcgcggcgacatcctgttaaaggctgataaaatgacgatggccaactcattggaactgcgcgtgccgttccttgataaagtcgtgtttgacgtggcttctaaaattccggatgaactgaaaacgaaaaacggcacgacgaaataccttctgcgcaaagctgctgaaggggtagtgcctgatcatgtgcttaaccgcaaaaaactcggcttccctgtgccgatccgccactggctgaaaaatgaaatgaacgaatgggttcgcaacatcattcgtgaaagtgaaacagatgcttatattgaaaaggattatgtccttcagcttctggaagatcattgtgccgacagagcggacaacagccgcaaaatctggaccgtgctgatcttcatgatctggcacagcatcaatgttgaaaaaagactggtgccggaagagctgaatcatcagccgaaagaagtcattttcgtttaatccaaaaggctttcgatgttatcgaaagccttttttctattgtttttttgtaaaccgtctattccgctctgttttcgacaaagtattacgcaatattcagaaaaaggttataataggactaatcgggtagattccggaaagtgttttctggctatttcgtctcggtttgtgtttctttgtcaaaatcagggggagggagagttatgcaaaacaaagaaaaaacgcttcaccgcggcttggaagagcggcatatctcgcttatgtcgttgggcgccgcgataggagtcgggctgtttctcgggtcggcttctgccataaagcttgccgggccggggattttagccgcctacgcctgcagcgggctgattatgttttttattatgcgggcattaggggaaatggcgattcaaaagcctgtagccggctcattcagccggtatgccagagattatctcggtccgcttgccgggtttttaacaggctggaattattggtttttatgggttgttacctgcatggcggaaatcaccgcggtcggcatttatatgggctactggttccctgacgtgccgtcatggatatgggcgctttgtgcactcgtcattatgacggctgtcaattttctggcggtcaaagcgtacggtgagcttgaattctggtttgcgctcattaaagtcttggcgattctgtcaatgatcgcgatcggtctggtgatgatcgtattcggtctcggaaacggaggcgttgcgctcggaatcagcaatttatggagccacggcggctttttcccgaatgggattaaaggggtgctgctatcgcttcaaatggtcatgtttgcctatctcgggattgagctgatcggtgtcacagccggtgaggtcaaaaatccggaaaaatcactggcgcgggccatagatactgttttttggcgcattctcattttttacgtcggagctttgtttgtcattatgtcaatttatccgtggcaggaaatcggttcaggcggaagcccgtttgttttgacatttgaaaaaatcggaatacccgctgcagccggaatcattaattttgtcgtattgacggcggctctttcttcctgcaacagcgggatcttcagcacggggcgcatgctgttcaatctggcggaacaaaatgaagcgcctaaagcatacggtacggtcacaaaaggcggtgtgccgggaaaagcggtattggtttcagcgggcgcgttatgcatcggcgttttgctgaactacgtggtgccggcgaaagtgtttacgtgggtgacgagcattgcgacgttcggagcgatttggacatggtcgattattttgctttcccaaatgaaataccggaaaagcttacagccggaacaacggaaaaaactgaaatataaaatgcctttataccccttttcctcatatatctcgctggcatttctcgcttttgtcgttgtgctgatggcttttaatgcagagacccgggtggccgtcatcatcgggcctgtctggttcggcatattattagccgcctattacgggaaaggtttccataaaagaaaagacataggtctggaaaacggacagacattcgccgaaaaagcgtaaaaaaaagagcccgggacatgggctctttttttcataggatcgggccggcggggaaagaataaaacaaattcctgaacattttgcttctgtttcctgacaatcgggagaatgcaaatggtttttacttaaataatattttgaaaaatggtacagtagtaaaacaaagctgatctatttttatttctcttgcagtgttttatagtatcggcctttttcaacatattccgttctgattctttccatgtcccgtatgtcttcttctgtcagccggcggataacctttgcgggccggccgaacgcaagacagccgggaggaatggttttgcccggaggaacgagacttccggcgccgataaacgcgccttctccgatttccgccccgtcaagaatgacggagcccataccgattaaagcattctttttgatgattgcgctgtgcagtgtaacctgatggccgatcgtgacgtcatcttcaataagaagcgggcggttcggactttgatgcagacagctcaagtcttgtatgctgactctttttccgattcttgtcggcgcaacatccccccggatgacggctgagaaccaaatgcttgattgttctccgatcacgacgtcgcccgtaatgacggcgttatccgcaatgaacgcttcaggatgtatgtcaggcgtaaattgtttataagggtagattatcatgtctcatccttctttctctaaatttatgtaagaggtgaactgcatgtggacttggaaagcagacaggcccgttggtaccattgtcattatccacggggcaagcgaataccacggacgttataaatggctcgttgaaatgtggagatcttccggatataacgtggtgatgggtgatttgcccggtcagggaacgtcgacccgcgccagagggcatattcgctctttccaagaatacattgatgaagtagatatatggattgataaagcgagaacgcttgaagcgcccgttttccttttgggccacagcatgggcggactgattgcgatagaatggtttaagcagcagagaaatccccgcattacggcactcattttatcatcaccttgtctgggtctgcaaataaaagtcaataaagtccttgattttgcgtctaaaggactgaacgtcctcgctccgtccctcagagtggattccggcttatcacctgatatggcaacgaggaatgcggatatgattgaagcggatcaaaacgattctttatatgtcacgaaggtatccgtaagatggtacagagagcttttaaaaaccattgatgccgctatggtgccgactgatgcgtttttaaaggtgccgcttttgcttatgcagggcggagatgacaaaatcgtcgataaaatgaaggtccgcaaatggttttccggtgtggcttcccataataaatcgtaccgggaatgggaagggctttatcatgaaatttttaatgaaccggaaagagaaactgtgtttaaggcggcaaaagcctttacagatcagtatatttgaattcgctgggggtgcatatgttgacagtaccggaacatccttttaaccttatggcaaaagtgtatcgggaaatttttccgctcgttcatcaggaattgaacatgtggcgggaaaaatcagattccattaaaaataccgaactgcggcagcaggcggccgcaagtatccgcgataaatcatttcattgtgaaggcggcggcattttagccctgctttcgggagagcagaaacagaaatgcgtgcaatttatcatcgcgtatcagacaatcagtgattatctggacaatctgtgcgaccgcagcacctcgcttgatcccgaggacttccgcatgcttcatctctccatgcgtgacgcgctgacggtcggtgccgaggtgcggccgtactatcagtacagagacgagcgggatgacggcggttatcttcatgagctggtcagaacatgccagcgggtgctcgggtcaatagaacattacggtatcattaaaccttatttgcttgagctgtgtgattattattgcgatcttcaggttcataagcatgtcgttgagcatgaacgcgttccgaggcttaaatcctggtttgagcagtaccggtcacagcttccggaaatggagtggtttgagttctcggcctgcgccggatcgacgttaggtattttctgtctcgttgcttactcattccagcctgattttaacgaacataccgctgagaaaatccgcagcagttattttccgtacatacaagggctgcatatactgcttgattatttaattgaccaggaagaggatctgcttgaaggcgatctgaatttctgtacgtattatcagtctcatgaagaaatgatgcagagactgcagcattttattgaaaaagcggatgaacatttgcaaggcattccgcatgaaaattttcatcggctgatcaacagggggctgctcggcgtctatttatccgatgacaaagtcgccggccaaaaagaaatgggccgcctcgcgcgaaagctgatcagggcaagcgggaaaacgtcatttttcttttatatcaacggaagagcctaccgcaaatttcagaagatggcttggacgaaaagttcgtaatggatgaactgcgcctctcgtgtaaatcacgacggcgcagttttttatttatgacgtgaagtatgaaatgaaacattgtttgcgcctgcagaatatgatactttaattttatgaaaaaattaaagtatttagcggtcatagcattactttccatttccggaggctgctccgtcatccatgcttccgccggctatcatcctgtcttgatagcgcacaggggctcttctgcgattgagccggaacatacagctttgtcttatgcgcgtgccattaaagacaaagcagattatattgagatagacttacgggagacaaaggacggccatctgattgcaattcacgataacacggtagatcggacaacagatggtaaagggatgacagatgatctgtctttggctcagattaagaaactgaatgcgggaaaaggagaaaagattttaacattagaagaaatcatacagaaattcggacaaactgccaattactatattgagacaagagaaagcaacggcagcctggtgatggaaaagaaactgattgacatattacaaaaacatgagctgatttccagccataaagcagtcattgagtcttttagcgggaagagcttaaagaaagttcgatctatgaataaaaaagttcctcttgtccgattattaaaagataacgaggctgaggagataaataataagcagctgcaaaccatcagaacgtatgctgatacagtcgggctcaacgccaaattggcaaatgaagcagtcgtgaagcgcattcatcacaataagatgaaagtgcacgtgttttttgataaggaagacgagcatacgctgacgcctattatgctgaaacaaaaagcagatggtgtctttacaaacaatcccgcttatacacgcggcttgctgcaaaacagtaaataaaaagagacatgcgcatttacgctgtctctttttttaacggtttcttttttgccgcaaggtgcattgcgaatttgccgatcagcccgatgacaaaaaatgcagcaaaccaccagtaataggtttttgcgaactcaaatcctaaatgtcttgataaaatgatgacgaacatcacatagggaacacttgaaaatatgatgcgaagaatattcaaactgccgctcctcccagatgttacacttaaaagatgaacttttttccattacttcatagtaattgatttttcagaaaaagtaaacacaaaaagaatcggcccgcttatgacaggccgattctttatttgccggcagatttcttttcaatcgctataataaacggcgggtcgtttcgctggttgagaaagccgtagctcagcacgcgcgctttttcctgatcaagattgctgcagtactccagtaatgcacttttttccgtcttgccttcaggatgcccgtggtacacaacgagaacgatcagcccgttctccttcagcagttcaaggagctgttcgatcgcggaaatggttgagtggccgtttgtcgtaatgcttttatcgccgccgggcagatagccgagattaaacacggcgcaagccacacgaccgtgcgcatcctcaggcagcgatgcctttatttgatcatggctcttatggtgaagcgtgacgcgcggactgaagtcggcaccgagccgctccttcgttttagcgagtgcgtccgcttgaatatcaaaggcatggacatgtcctgtctcaccgacaaggccggccaggaaatatgtatcatgtccgttgcccatcgtcgcgtcaaccgtgatatcaccttcctgtgcggcggacttcagcaattctttactgaaagggaggatgtgcatcaaggtcatagggcggtctcctccccgatctttctgaagagctttccttgatagcttccccgtgtttccagctctttttgaatggcgcccagtacttcccacttattgacgctccacatcggtccgaccattaattcgatcggcccgtctcccgtaatgcggtgaacgatcatttccgggggaatgatttcgagctgatcacatacaagacttacatattcttcttgagaaaggaactccagctttcctttttcatattgcttcaccatcggtgtgccttttaataagtgaagcaggtgaattttaatgccttgcacatccaaatcagcgacggctttggccgtctccatcatcatgtccctgttttcaagcggaagcccgttaatgatatgggaacaaacgcggatgccgtgttttctcagtttattgacaccctcaacatagcagtcaaaatcatgggcgcggttgatcagaagggcagtccgctcatgcacggtctgcagcccgagttcaacccacaaataggtccgctcattcagttcggccaaatattccacgacatcgtccggtaggcagtccggacgggtcgcgatcgacatgccgacaacgccgtcaagcttgaggacggattcgaatttttctcgcagctcctctaccggagcatgcgtattcgtgaacgcttggaaatatgcgatatatttgccgtctttccacttttcgtgcatgcggtttttgatatcgtgaaattgcgtgagtaagtcatcggcccgattgccggcaaaatcgccggagcccgccgcgctgcagaatgtacagcctccgtgtgcaaccgtgccgtcccgattcgggcagtcaaaaccgccgtcaagcgcgactttaaacactttatgcccgaaatgctcccgcagatgataatttaatgtatggtaccgtttttccgtatttgaataaggaaaagggttattctcgttcaatgttcaaaaagcctccctcacatcagatgcatcctaaaattgtagcatgaatgatggagcggaacaatgaaacaattatggaacggtcaggacgtaatatctacctggtttttctgttgttgttttaaacgttttggagaaatatcactgaacaatgcaaaaataattcctaaaataagaattacactgcctactttgaatgtattattaaaactgtcacttattttttcattatataaatttgaaatttttttctggatagccataacttccttcttttgaatattgaagcttttttgtactttttctttatacggatccggggttatagagagaatttcttcctcttttttgtttaattcagcaatacttttgcttcgatcgaaacctttactgtctgaatgctttaagtgagttattatctcgttctttgcatttttatcaaaaacctgattgctttccacaattttaatggcttcttttttcgcagtagctgtgtgatcatttatattcattgtaagcacagatgtaagtatggcaattcctagcgcttgtccaactgtccgcatcatattaagaatacctgaggcaattcctactttctcaggaggaataagccgtatccctgaactcattgctggtcctattacaagccctaaagctaagccggtcaaacataacagaataattactgacgttatagaactgtcgtatcgtatgtatccatataaatatgttgtgattgttaaaccgagcatacctagacccgaaagccaaatgcccccgagtttatcagatagctttccagaaagtacagaggtaaacatagatgatagagctaatgtagaaacaattaaccccgcttctaattcagtttttcccattaaattcgtgaggagtaaagtaataataagggtaccgcttgttaatccaaggccctgcataaagagggtgaaagaactgaaactaaatgtacgtatcttcagcatggataagggaatcatcgggtttttaattttagattcaataaagaaaaacaaacagaataataatacagagattacaaaaagagagataattaattgtgatgaccagcctaagtcagatacttttgcaaaaccaaaggttaaacagaagagagctccggataaaataagaatccccatgtaatcaatttttttactcactgtttcatcataactctcagtaataaaaaatgctgctaaaaaaagagaaatcagacctaaaggaatatttatgaagaagatagcttgccaattaaaattttcagttaataatcctccaagtacaggtcctaatgtagctgctaatcctgagaaagcaccccagattccaatgatcattccttttttattttgaggtacgatagctaaagctataggcattgtaacaggtacaatgaaagcagcagataatccctgaatcactctaattgtgacaagcatttcaattgaagtgctcaaacatgcaataactgatgtcaaaataaaaagtgctaatccaaacataaaagctttttttcttccaaaatggtctgccagctttgatgcacctactaataaaaccgcaaaagctaaagtataacctgtagccacccatgctacttgagaaaggttactcgaaaaataatccagcatcttaggtaaggcgatatttactatagtggtgtccattactgaaatgaatgtacctaataataatgcagatagcataattaatttttgaaaattcaaacctataacctccattagatattaatctaaattcaagttcgatatatatctaaaaacatgataaatgtaatcttaagaggtgtcaatattattcataaattgttttttcatccacttttctcgaaatcatatttttataattcaacaattttgtaacttgaaataactcaataagagctaaaattgacctgtaaattagctgagatgatgaaggatttctgaagagtgtgacatgaggagaacactcagcaagaggtgaggcaagtttaataaatctaggactgctcttgataatgctcagtcaggtatgtgcttaaaggaaaattctttaaaattaaaaatgaatattctttgaaagttcccttttgattgataatattaaaaatgtaaaatgtctgacatgaagatagtacaacgttttccttgtggaaaaagactttatggggtgtgaaaaagtgcggttaataattaatgacagtgtttcagaattctttgacaagatatcctctattctattcttggaacacgaggaattcttcaaagattatacaaccaaattgggtataaaattagataatgaatattttgtattactagatgatcttaaaagaataaaagaattagatagtgagtttttaaatttttattttggcagcttttgcgactacaaagatgttaggaatgcaaatattttttgtttagccacaaccttttttaaaatcccacaaatttatacgaaagatttttttgaaattattgattatttgtctgcagttacagaagaagagataagaaaaaatattttagagtctctaatttatttacaaggagatcttaaaactgaaacatctacccaacagtatttaaatgatagggaaagtttatttgagctacttaataatctaaatatcaagcccgaatacaagtggatcatatttaaggtaatgaaatctcctaaaacttatgtagatcaattttgcaataaattaatgttggtgaatggttatcttaacgaggcgatttataatttaattaaatttagagatgagtggatgaatcaattaaaaaacataaatatggattttccaaaaaagataatcagtacgttaaaaggtaaggaatacttatcttgtaattatattaatatatatccaacacttttaccttacactgcaactattacgaaaagtgaagataacatttatgttggactggggtataaagttgatgaaatttttgaaaatacattggagaaagcagagattaatcacatcattgattttttgaagcttttatcggataaaagtaagttcaagatattaattttacttagtcataaaaaaatgtatgctaatgagattgctgaacagctaaatttaaccaatgcaacgatttcacaccatatgagaattttgacattgcaaggtttagttgagagtacgagaaatcaaaataaaacatactattatcttaattcttcaaaattcgattctcttttgaacggtttgttgaaaaaatttaaagctgttccaggcttagatggggatgagtaaaaaaggttttggttttatagttggtgttagtttcgggatgataattaaagctaataaaaacagatcgtctaatgaattggatacccaaaaaatatgatgaatcctgggtgttttacacaaaaaagataatttgatggtgaacaatttaaagcgaacagaagatcttgtgagtgatgtgagaaaattttaatgtttttaataaaagaagaattaagttatcgttctaaaatggcggatttttataaagatttcattctgtcttgattaagttttacatttaatcgtattttataccatctcgtcttgtgtatgaattacctgaaatttcttgtgagaatttatttggaataagaaatactattgatatgacattatcaataggaggactgtttaatggcaacaagacaatcagtagatgaacatctccaaagaagcgaacaggcgtatgaatttgcgaatgagcaatttatgaccgcttcgaaacaagagcattataatgataatgagtacagtgaagcgcaaatgatgcttgaaaacgcggtgaatgaattaaacaagctgtcattatctgcgaatgatcagcaaagagagcagctttaccgaatgagattgcagctgcagaccttgcaaaacaatatgattttgcagcgtaattttgattactgaccgcgccgtttcaaatggttcagcaaacctgccggaatcccggcgggtttttttgtatttcttttaaaaaaagaattgacaatagggcggagtgtgtttattgtattacgtgtactacttgatgtaatacacataaaacactcgaaaaatgaaatcgacatataaatgttaaccatagggaaggggaactttcatgaaaaacaaaagatccgtaaaacaagatgtgcctcttattatcgccgcctcggttttggcaagcagtctgtttgtcgttcttgtcgtcatcggttttcaatggcagaacatttaaagaaagagagcagctcgtaaaagaaagaagggaagtaaatgattcaaatcgatccgagaagctcaactccgatttatgagcagatcatacagcaactgaaagagctttgtttaaaagggatcatgaagccgggggataaacttccttctgtcagggaattggcaacgatcattatcgccaatccgaacacagtcagcaaagcgtacaaggagctcgaacgcgatggtgtcattgaaacgctgaggggaagaggaacgtatatatcggagaatgcaaaaacgacattggttgaagggaagatgacgatgataaaagagcaattgaaacagctcatcatcgatgcccattacgcgggagttgagctggagaagctgcaggaatggataaaggaaatcagcgctgatgtgaaaggaggcaaggatcatgattgaattgcggaatctctcaaaaacgatagacggtaaagaagtgctcaaggatatttcgctcactatcggaaaaggtgaaattttcgggctgctcgggcgaaacggatcagggaaaacaacactgctccggcttattcagcagattctgctgccggatcaagggacggttttatttaatcaggtggaaataaagcggcatccgaaagtcaaacagaacatcatttatatgcctgttgaaaatcctttttatgacaagtatacatataaacagcttgttgcgattgtaagcagaatctatccgaattttgatgtgacttacgccaatgagctgatgaacaggtacggcattccggaaacgaagaaataccgtgaattatcgacaggcctgaaaaaacagcttgcgctcgtgcttgcctttgcttcacgcccggctcttatccttttggatgaaccgacggacggaattgacgccgtaacgcgtcatgacgtgctgcagcttatggtggatgaagtggctgaacgggaaacgagtattctgattacctcacaccgtttagaagatattgagcgaatgtgcaaccggatcggatttttggaaggaaatcagctgacgaatgtgatggacttggatgatatgaaggaagagtacatgaaaatccaaatggcatttgaagaggacgtcgccttgaagatcagagaacaaaacataccgattctcgaccatgccggtgtgttttatacggtgctgattcaaaagaacgatgagaagaaaaagaactttctgcaagagctgcggccgaaagtatggaatgaacttcctgtgaacttagaagaggtcttcatcgcgaagtttggagggaaccggagatggtagacaggggattgctgtacagggaatgggtgcagaatcgaactgttcttgtgatggtcggcatttttttagcggcggtcaatccatttgaagtgttaaatacctatctggtttatcaaggctgtctggacacccacggagcatattgtaagttttatgtgaattctttggatagcggaatgctgaacttaaactgggcgcccgctgtcattttggcggtttgcttattcggactggaacgtacgaaaggaacgattgatgcgcttttcagtctgccttattcccgcgctcaggtgtttcacactaaattttggctcggagcggcggtcattgccggcgctcaggtgatcggctacgggctggctgagctgctcattcttctgttaaagcctgagcgcgtatatttctttcaccattacagcgtcggagagattattgtgagtgttttggcttttacattggttgcgagcgcgggctgcttaacggggaatacgttcgcccagctgttgacggcgtttactgtgtcgatatcaccatacttgatcattacgttgccgttgtccaatgtagaagtcatcttcggagccggcatgtatgagctgatgccgtcagtcgatgcttatatcaaagtatacaatctttttcaatacttgaatccgatcatgtacattgatacagattgggtatctgccagcaagtatatattactcatcccggcagtgatgagcattgtattttatgccatcgggtacttttgctatgtcaggcagccggtggaacggaacggccgttttttcctttggagacagcttgaccggcccattcagattgtggtgatcataatcgctgttctcggttttggcctggcggggtactcgacgggacatacgatgacaggatatgtggccggaatgattgtcgggggagcggtcggatttttggtcagttattttgtgatttataaaaaaacaaagcatgtgtaagagaggaggaccggaatgataccgcggggactgttgtacacagaatggaaaaaaaatcagtggttgtttttatgcagcggcattcttttaatggcggcaaacccttttatggtttataacaactactcaacatatcaagaatgtttgaataacccagctcttcaagattgtgaattcgttgtcaattatacgaatgggtcgcctctttccttcagctggattgtgagtgtcatcattgccgtcttcttattaggcttggaacggacaaagggaacgatggatgctttgttaagcatgccttacagcagaggccaaatctttcagacgaaattctggcttggcgcagcagtcattgttgttcctcaggcgataggctatggagcggcgtcattgctgatatctttgctgaaaccgagccatacgtacgattttgatcatttttcaatcggaatgattgtcatcagttttatggcttacgccttgttaatggcatccggcgcattaacgggacagatattcgcccagctgttaacggcgtttaccgtcacggttctgccctttttactcatcggtctgccggccgcgaatttggaggtcgttttcgatattagtgtgggaagtcaattttcttttatcagcagttatatcgaatcccgtctttttatatttgtaacccctattggatatgtgtttaacgactggatcagagaaagggatttggttttaatcattccgattgtgatgagccttgtcttttatctgatcggttacgtcagctttctgaaacatccgaatgaacggaacggcagattctttctttggagtaagttggaccggccggcgcagatcttggtgattgcctttgccgttatgggtttcggcgttttcggatacggggtcacagacacgatgttcggctatttagccggcattatcttcggcgcggttatcgggtttttcatcagttattttacggtttacaggaagtcaaagcatatgtagatctgtttgaaaatgagcagtttggaggaaggcaaggtgccgattagcggtttgctttataaagaatggaagcagcggcagacactgctgcttctcacagcggggttcttagttattttaggccctttggcaattataaatgagtattttcactataaggattgtttgagtgtgcttcatcaatattcaggttcagtttgtacgttcagcattgattacagcaatcggaatttgattgggcttcatttcattcctccggttatgatggggctttttctgataagaggaggccgggctgaaaggatgtttacactgagccttccgtattcgagaagccggatatttcatacgaagtttttcttgggagcagctgtgttagccggctcgcaatttgtttcttacggagtatctgacatattgtttctagcgcttaaacctgacgctgtccatcattttcaatcattcagcgcagggatgctggtcatcagcttgatgatttatgcattagtgacagctgccggcacgataacgggcaatttagcggcgcagctgatcacagcgttcacggtttccgtctttccgatcgtggttatgacgatttacctgttaaacgccgagttcctttttggcaggcaggctgtgccggatattgatttcccttggagcggatttctgatctatttcatgcctgccgcttacatccatacatcatggatgtattacatgaaacacgcattgttaatctccgcattaatgggatgttgtttctatctattcggctatgtgaatttccttaaaatgccgagtgaacgaagcggacattttatcctgagcaaacacattgaacgcatcattcaagtgctcgtcatggtgctcagtatgctgggaagtgcgggggtgtgcggatatgcttataacggttcgtataccggttacatattcggcatgcttatcggcgcggttatcgggtttttcatcagttattacttcatctataaaaaaacgaaacagatataagggggagtggtgtacgtgatagaagtacagcatattgatcattcatttaaaatcggcaggaaaggcagagagagtgaggttccggtgctgaaggatgtctctttgaccgttgaaaaaggggaaattgcctgtatcgtcgggcggagcggttccggaaaatcaacgcttctgaatttaatatccggatacatagcgccgacgaagggccgtatcgtcattaacggcactgatgtgacgggcttcagtgaaaaagagtgggcgcagttccgcctcgggcatttcggctttatttttcaaagctttcagctcattccgagtctgacaacctatgaaaatgttgaaatgccgcttgccttaaaaggcgtcaaaccgtctgaacgcaagcagaaagtcgcggacatgctgaaacgggtcggacttgagaatcatgcgaatcattatccgaatgagctgtcaggcggccagcagcagcgtgtcagtatcgcaagagccctgattttaaatccgtcgattattttagctgatgagccgacgggaagccttgattcagaaacggaacttgaggtgcttgcattaattcagcagctgaaccgggagcgcgggattacatttgtcatcattacgcatgacgatgaagtcgcttcgatcgcgcattcaaaattccagctgcatgacggtgtattaaaagggggcgttactgttgagatttaaggatcagattcactttatcagaagaaatatgaagaaaaaccggctgcgtgttttcatgacggtgctggcgacgacaatggcgtgcgcgtttttagtggtgctggcttccgtcggattcggcatccaaaaaacgattacagacattacgatgagccagcagattgttacggaaatcaatgtcctcggccaagagaacggaaaagccgtgaagaagtcagacttggaaaagtataaaaatgtcaagtctgtcgttgaaagaacacaagtgtatgaaccgaacaaagcgtcattgggaaaccgaacaaatgaagattcagccattgtgctgacaaacatgaacgatgaagtcaaagccaatatggagcttgatcggggaagagtcgcccgcacagagaatgaaatcgtggtcggctatgattttgcgaagaacctattgacgaaaaaagaggctgacgcttacgacaaagagttaaatgatcaccaaggcgacatgtcggaggtgaaaaaaccaaaaggctatacgaaagacctgcttaataaaacgatacagctgagcatctccaaaacaaacaaagacggagacgttgaaaaaacgaaaacgtacgacttcaaagtagtcggaattacaaaaaaaccgtcccaagattggatggaggatacaaatatttttgtgagtgatcaattcaagaaggacttctcaacattcttggatctgaagaatggaaatgcggaaaaaagcatcaatgtgtatgcagacaaattcgatcatgtcgatcagcttacccatgacctcacggatgacggcttttatgtcagatctgtcacaaccgagctgaagggcgtcaacacctttttcctcgtctttaaaatcggcctgatctttgtcggctttatcgccgtcgtgatttctgccatcggtattttcaatacgatgacgatggcggtgacggaacgaacgcaggaaatcgggattatgaaagcgatcggcgcaagcccgtccatcatccgcagaatgttcctgatggaaagcgcctatatcgggatattaggttctgtcatcgggattatcatttcttacggagtgagttttgccgtcaatctggctgtgccggttattttgaaagcggtagggggaaacaccggagccgaagatcttcattataccttctcctatatcccgctcagcctcgttgtgattgcagttgtcatttgtgcgggggtcgcggtaatttccggtatgaatccggcccgcaaagcgacaaaaaccaacgttctgactgcattaagaagagaactgtaaaggaaaaaagccggctggacatcagccggtttttcctctatctatcagaaaagggcggataccatgtttcacattttgttaatagaagatgataacactttgtttcatgagatgaaagagagattaacgggctggtcatttgcggtgcacggaataaaagatttcagccgggtcatccgggagttttctgaaatcaagcctgatttggtgatcattgatgtacagctgccgaaatttgacggctttcattggtgcagaatgatacgctcccaatcaaacgtgccgattctctttttgtcctcgcgcgatcatcccgcggatatggtcatgtcgatgcagctcggggcagatgattttattcagaagccttttcactttgatgtgttaatcgcgaaaatacaggcggtgttccgccgtgtgcatcaatacggcacagaacctgcgctgatgaaaagatggtgcggggcggtcattgacacagaaaccaacacggtcagccgtaaaaacggttcggtcgagctgaccaaaaacgaaatgctgatcttaaaactgctggctgagcagaaaaataaaatcgtcagcagggaagaactcatcagaagcctatggaatgatgagcgtttcgtcagtgataatacgctgacggtgaatgtcaaccggctgcggaaaaaactcgatcaattaggcatcgggaaaatgattgaaaccaaggtggggcagggatacatcgcaaaggaagaagacggtctttatgattaaatcatttctgctcgaaagaaagagctggatcgcgatgtttcttttgcagcaggctgtgctcctttttgcggcatatattgatccgtctattccgtttctttcagtgctgtattttgtttacttgtcgcttcttgtgtttcttgtatttctcttgttccgctatcgtaaagagaccgcctattataaaagcttaagagagtgggacgccaatttagacatgtcttaccttaaagcgcctgacagtccgtttgagtctatcgttgaagaaagcattgaagggcagacagagcagttaagaaaaagctcacttgatcttcaggcggcgtcagagcatgaaaaggacgatctgatgtcatggattcacgaggtcaaaacaccgatgacagcgatgcatctcatgattgagcgccttgatgaacagccgctgaaagcccctttgctgtatgaatggctgcggattcaccatcttctggaccagcagcttcatcagaaacgattgtcctttattgaaaatgatttatcattccagcgaattcagctcaggccgctcgttttcaaagaaattaaaaatctgcaatcatggtgtatacaaaaagggatcgggtttgacattcagcttgattcaccagacgttcacagtgacggaaaatggctttccttcatcatcaggcagctgttaagcaatgccgtcaaatacagtgaggcggatgacattaccgtaaaaagctatgaacaaaacggccgggtgcatgtggatatcgaagaccgcggcatcggcatcgagcccaaagatcttccgcgcatttttgaaaagggatttacctcgacgcgaatgaggcgtgatcacgcgtcaacggggatgggcctgtatttggctcaaaaagccgcggcaccgcttcttatccagatcagcgtgcgctctgagccggaaagcggcacggtttttaccttggtgtttccgaaacagaacgatgccgtcagcatgttcagcgtgtgacaaaagtgtcacatgcttttctcttttgttcgcttaatcaaacgaaaaaaacggcttctgtttttaaaataaagataaccaatgtaaaaggagaatcagaacgtgatgattttagaagcaggcaatatccaaaaaagctacggaaacaagctgaataaacaagaggtgctgaaaggaattgatcttcagattcacaaaggggaattcgtcagcattatgggcccgtcgggatcagggaaaacgacccttttgaatgtgctttcctccattgataaagtgagcgcgggcaccattaaactgaatgagacggagattacatccatgaaagaaaagcagcttgccgaattcagaaaacggcatctcggctttatttttcaggattataatttattggacaccctgaccgtgaaagaaaacatactcctgccgttatccattacgaaaatgtctaagaaagaggcggacctgcgatttgccgagacggcagaggagcttgggatctatgatttgcgacataagtatccgagtgaaatttccggcgggcaaaaacagcggacgtctgccgcaagagctgttattcacgaaccgggcattatttttgctgatgagccgaccggagcgctcgattcaaaggctgccatggatttactgaataaactcagccgtctgaatcaaaaacgccgcgccaccattgtgatggtgacgcatgatccggttgccgccagctattccggacgtgtgattttcattaaagacggccgtgtgtatacacagctgaataaaggcggccaggacagaccggacttttttcaggatattatgaaaacgcaaagtgtattgggcggggttcaggcatgagtattcatcatttgatcttccagaacctgaaaaagaatttgaaaaactattacctttacgtttttgcgctggtgttcagcgccgccctttatttcgcgtttgtcacgatgcaatacgatccggcgcttgatgaaatgaaaagctccataaaaggagcggcggcaatccgggcagcctctgtactgcttgtggcgatcgtgtcggtatttcttttgtacgccaacactatttttattaaacggcgcggccgggaaatcggcttattccgattaatcggcatgacgaaaatgcacattttccgcatactcagcacagaaaatttcattttgtatttcggatcgatttggatcggtatttttgccggcttttctctctcgaaattatgtatgatgatgctgtttcatacagtcggtgtgaaagcctctgtctcactgtttttttcaaacaaggcgctcgttcagacgttaattgtgttcggggcgatttacgtgctgattatgatgatgaattacttatttattaaacggcaaagcattttgtctttatttaaaaccgcgtcatcgtcagaaagcggcataagacggctttcttgggtgcagatgtcgatcggtgttgtcggtattgcggccattatcgccggctatgccgtgtccgcggatttattcggaggcagttttacgagcatgaatgaactgttttcggccatggtgtttattctcggctcggtcattatcggaacctatctgttttataaaggttcggtcagctttctggcaaatctcatccgaaaatcaaaaggcgggtatctgaatgtcagtgaagtgctgtctttgtcatccatcatgttccggatgaagtcaaacgccgtcctgctgacgattattacgactctttcggcgctggcaatcggtttgctgtctttaagctacatctcgtactattccgcggaaaaatcggctgagcaaaatacagccgcggactttgcgtttgataaccaaaaggagactgactcatttaccgctttattgaagaaaaacggaattgaacacaaagtgaaaacaatcaagaccattcaagccggtgtcaatatgaagaacatcataaacggcgatatgaaaagctttcaacaagacccgtccagcttggcgctgccgattataagcgagaaagacgcggaagggacggagctttctgacggagaagccgtgtttaccggatataatgatatgatgaaaagatttctcgacctgaaaacgtcaggatccattgatataaacggtaaaacggataaaataccgctggcgtataagggcttgaagaacgacttcctcctgtcatatacatttacaagcggagggctgccgaccgttatcgtcacgcagcaggtatttgaccggatcgagaaagatatcgatccgtccattcagggaaaatcaaatcgttttttcggcattacactcaaacgtgaagaggacatccaaaaagctgatggtctgtttcaggcgcagcactattcagacggtgcgctttcacaatttgaaacggctgacacgcaaaagaaaaacatggggctggtcatgtttattgtcgggtttttaggattaacctttctgattacctcaggctgtatcctttattttaaacaaatgggcgagtgtgaggatgagaaggctgattatacgatattgcggaagctcggcttcacaacgggagatctgctgaaaggcatccgccggaagcaggcgtatcatttcgggattccgctcgttctcgggctgttccacagctattttgccgttcagtcaggatggtttttattcggaacggaagtgtggacgccgatgatcatcgtcatggcgctgtatacgctgctgtactccatcttcggcatgctgtcggtgctgtattataaaaaggtcattcaatccgccttgtaaaacaagttgaggagcctccgcataagcggaggctttttttgtatgaatagaagaaagcgatttttaaaagaatagacatacgtcattttttcgcgcgggggagccttatgcagaagtattttcaattgaaatctgaaacaggggcctttcatcttttttccaaggaacacattttcacgctgttgatcatcggattgcttggggtgtgcgtgatcatattccggaaacagctcaaccagagtcgcatgatccgctatgtactattcattctccttgccgtgtcgcagatcagctatcatatatggctgctttgtcatcatgcctggtcgctgaaaacagctctgccgctgcagctgagcgacctttccgtctatttggcgatgctgatggtcatgacaaaaagcaaaaaactgttcgccttcctctattttgccggtttgggcagcgccgtacaggcgatgacaacacctgatttaggggcgtattctttccctcattttcggtacatcgtgtttttcgtctcccacggctgtgtttttcttacctgtctattcatggccgctgcagaaaggtacagaccgtcggcgcgcggactgtgggtatcggtgctgatcgtaaatctgtacggggcgtgtgtcttttttattgatcgtatgctgaatgcaaattacttatatttaatgaaaaaaccgaagaccgcttcgcttctgaatgttttcggaccttggccgtggtatcttctatcaatggaagcggcggtgatattgagctttttcattctgtatatcccgttttggctgctgaggaaaagagcgtgaggccggcctgtttttgtgaatccaatcatttgtaattttttcaacattccggcattatttttttcagattctgatgttgaaaaaagatgtccgcggcgatagaatgaatgtgctatgataacgtgttcgatacggagccgcggcttgcggtttccgttttttcatggggttttttatagagagagggggatcggtatgccgcgcgctttgaagatattaatcatcggaatgtttatcaatgtgacgggcgcatcttttttgtggccgctgaatacgatctatattcataatcatttagggaaatcgctgactgttgcggggattgttctgatgctgaattccggtgccagtgtggcggggaatttatgcggcggatttttgtttgataaaatcggcggattcaaatccattatgctgggcattatgatcacattggcaagtcttctcggactcgttctgtttcaccaatggcccgtttatatttggctgctcatcattgtcggcttcggttccggtatcgtgtttccggccagttatgccatggcgggagcggtatggaaagaaggcgggcggagagcttttaatgcgatttatgtagctcagaacgcaggtgtcgccgtgggctcggcactcggcgggatggttgcggcgtactcgtttacgtacgtgtttttagccaatgctatgctgtatgtgctgtttttccttatcgtatttttcgggtttcgaaatatcaaaactcagcatgcgagccaggtttctgttctggactacgagcctgtcagcagcagaacgaaatttacggcgcttctcatattgagcggcgggtatgttctcgggtggatcgcctattcgcagtggtccacaaccgttgcgtcacatactcaaagcatcggtatgccgctttcattatacagtgtgctctggaccgtaaacggaatattaattgtcgccggacagcctctcataggagctgttctgaaaaaatggtccggtgcgttaaaaacgcagatggtcatcggcttttgtatttttatcgtctcgttcggcgtgcttctcagcgccaagcaatttccgatgtatctcaccgcaatggtgattttaaccgtcggagaaatgcttgtctggcctgccgtgcctaccattgccaatcagcttgcgcctaaggggaaagaagggttttaccaaggattcgtcaacagtgcggcgacgggcggcagaatgatcgggccgcttcttggcggcgtgctggttgatcagtacggaatgagcgtgctgctgttgatcctgatggtgcttcttgttgtcagcatcgcagcgacggtgctgtacgacaaacgcctgaaaaccgttaataaacaaaacgtccaagtgcgatgacgacataaaaaatcccgctgtttcggcgggatttttttgtttatacgaccggaagcacgttgacggcgtccttaacgtttaaatatgtctttaatgaagaaaagctggcatcaagctgattcattctcatggcgagggaaggcttgatacccgtgataatcagttctgtgccgattaatttaagcaggtggtgcaatttgaaaatccggtctgcggtctgttcgtttacctcggccaaacctgataagtctataattaagtaatcatctttagatgcggttaatatgtccgtcaaagttgtcacaattgaatcaaatcgttcttccgttaagtttcccactaacggcaaggcggagatgccgtttcggatcggaacaatcggtgttgaaagcgtcgtgatttctgtgagggaatcctcaaggagcttttcgtattctttctgctctgtaatgtctttttgaaaaccgacaaaatagagcttgtcttcaacatacagaggatcaatgttgagttcattccaaaatggggtgccgtcttttttgacgtttttcagccgcaccgtgatcttttctttctggtttaagctctttctgattttcgcgacttgttgacggtcggtttctttgctttgcagaaatctgcagttcttacctaatatctcttcggaagagtagcctgtcatatccataaatccctgatttgtatatatgatgggattgtcctcaagagaggggtctgtaatcaccacgccgatgcgtgcgtgatcaagcgcctttttgataagctccagctgctccagttttccggatacatttgagtcagccatgtaaaacccccttttggccgtaaagctgcgcgctttttcagccattgtttctcccctttttaaatgaatctacagtaaccgtagcataacatatgttctgattcaagcaaccgaagtttgcaatttgtcattcgggcttgtcctcatatacactgaatatataaggggaaggcacatcatcgctaagtaagtgactaggtcattgtcactgggtgaaaaatgaatctaatgcatcaagcttaccgatcatgtgttcacatataatggaagaaacaagctttttactttcctgctcaatcgccggtatgtagatatcgaaaatcatcgtattcgtaagggggctggatggcctgaagtcgctttactaaataagggctttaggaaggtgatgaagatgctgcatcaggtaataattgcttgtgtaattggaggaatcatgggggttctcggtcatgtgaaaaagagaggcaggctggagaaacccagaatgacaaagcggtttatctatctcggttttttggaagatggttttatcggaatggctgcttccatcttacttgtcttatccgctgaccccgattcaggaattcaactcgtcatcttatccataatcgcaggctacggcggagaagctgttctcaggagctttgattttgtcagagaacaaaacagtgattcggccgaagcaaaaccacaccagcaaaaaaatcctccatcaaaataatatccccgctcacgacccgttccgggtacattcccattgtatacaaacctgcttgcacttatgaacagaattctataaaatacaggtaagattacggtagcgataagaacagtgaagaggagcagtaagaagcagatttcgcactcagagagttgacggccggtgcaagtcaatcaagtctgtttccgaactcgcctcagagttgcagcggcaaaaccgctgacgcataactgcgttaaaagtatcaagtgagtgcggcttaaaaccgcgctaacgagggtggtaccgcgggaaacaaaaatctctcgtcccttttagggatgagggagttttttttagttttagaataatctgaatataatcttcctcatcccgtcaatacttggactacatacgccgtattcaatcagaaggaggtttttacgttgagttttcagcacgaaaaaatagaaaagaaatggcagaattactggttggatcataaaacgttcgccgtcagtgaagagaatgacaagccgaagttttacgcgcttgacatgtttccgtatccttcaggagccggccttcatgtcggacatccggaaggctatacggcaaccgatatcctttctcgcatgagacgcatgcaagggtacaatgtgcttcatccgatgggatgggacgcgttcgggcttcctgccgagcaatacgcgcttgacacggggaatgatccggctgagttcacaaaacaaaatatagataatttccgccgccagatccaatcactcggattttcttatgattgggatcgtgaaatcaatacgactgatccggactattacaagtggacgcagtggatcttcaccaagctgtacgaaaaagggctcgcttacgtagacgaagtgccggtcaactggtgcccggcgctcggaacggtgcttgcgaacgaagaagttattgacggcaaaagcgagcggggcggccatccggttgaacgccgcccgatgagacaatggatgctgaaaatcaccgcttatgcggacaggcttcttgaagatttagaagaacttgactggccggaaagcattaaagacatgcagcgcaactggatcggacgctcagaaggcgcaaacgtgcatttcgcgatcgacggcactgatgacacgtttacggtttttacgacaagaccggatacgctgttcggcgcggcttatgccgtactggctcctgagcatgagcttgtggaggccatcacgacacctgaacaaaaagaagcggtagacgcttatgttaaagaagttcaggcgaaaagtgacctggaacggacagatcttgcgaaaacaaaaacgggcgtcttcacaggcgcatatgccgtaaaccctgcaaacggggaaaagctgccgatctggatagcggattatgtcctcgcctcttacggaacgggcgctgtaatggccgtgccggcgcatgacgaacgtgattttgaattcgccaaagtgttcagcctgcctgtcaaagaagtcgtaaaaggcggaaacacggaagaggaagcgtacacgggagacggagagcatgtcaattccggctttctgaacggactgaataaagcggaagcgattgaaaaaatgatcgcctggcttgaagaaacgaaaaacggtgagaaaaaagtgacataccgtctgcgtgattggctgttcagccgccagcgctattggggcgagccgattccggtcattcattgggaagacggcacgtcaacagccgttccggcggaagagctgccgctgattctgccgaaaaccgatgagatcaaaccgagcggaacaggtgaatcaccgcttgccaacattaaagagtgggtggaagtcactgatcctgaaacgggcaaaaaaggcagaagagaaacgaacacgatgccgcaatgggcgggaagctgctggtatttcctccgctttatcgacccgaaaaatccggatcagctcgcttcacctgagaaactggataaatggctgcccgttgatatttacattggaggagcggagcatgccgtgcttcaccttctgtacgcgcgtttctggcataaattcctctacgatatcggtgtcgtgccgacgaaagaaccgttccaaaagctgtataaccaaggaatgattctcggggaaaacaatgaaaaaatgagtaaatcccgcggaaacgtcgtcaatccggatgaaattgtggcgtctcacggagcagatacgctccgcctgtacgaaatgtttatggggccgcttgatgcatctatcgcctggtctgaatcaggtcttgacggagcgcgccgcttccttgaccgcgtatggcgtttgtttatcgaggaaaacggcgagctgacgggcaaagtgacagaaggcgtaggcgaaactcttgagcgcgtctatcatgaaacggtcatgaaagtgacagaaaacttcgaagcccttcgttttaacacgggcatttctcagctgatggtcttcattaatgaagcttacaaagcgaatgaactgccgaaagactatatcgaaggttttgtgaagctgctttctcctattgcgccgcatttggctgaagagctgtgggaaaaactcggccacgaaggttcgattgcatatgaggcttggcctgcctatgacgaatcaaaactggtggacgatgaagtggaaatcgtcgtccagctgaacggaaaagtaaaagcgaaattaatggttccggctgatgctgataaagcagcgttagaacagctcgcacaagctgacgaaaaagtaaaagagcagcttgaaggaaaaacgatccgaaaaatcattgccgtaccgggcaagcttgtcaatatcgtggcaaactgaccgggcgaagcccctctcctacagagaggggcttttttatcagcctctatcatagaaattgcaccgcgggctttggtatacttaataccataaagatgaatgggagtgtcacacattgaaaataaatgaaatcagcacagccgcactggaagaaaaattaaaagcgggagaagagctgtatctgattgatgtcagagaagacgaagaagttgccgaaggaatgattccggaggccgttcacatccgcatgggggacatccctgagaagatggatgcgttagacaaggacaaggaatatgtatttatctgccgttccggaaaaagaagcatgaacgtttgtatgtatttacatgagcagggcttccgtacggttaatgttgaaggcggcatgctggagtgggaaggcgaaacaaagccgaagaaataacgctttgaagtgaaagaagaaaagggatatgcgtctttttcttctttttttataaaaaaacgggaggcgaatcaggtgaaaccgatgatccgcgcgatgaaaacaaacgatatcaaacaggtccggcaagtcgcagaacgcagctggcatcatacgtatgaagggattattcccagacacattcaagatcagtttctcgaatccgcctatcaggatgagatgatggaacgccggctcttgcattctctgttctttgtggcagaagaagaggggcgagtgctcggttttgcaaatgccaccccggttcaaaaagacggaaatgcggagctgaccgccatctatattgacccggattgccagggaaacgggataggcacggcactccttaaagaatgcatcaggcagtccggcggggtaaaaaagctttatgtccatgcagaaaaagagaaccgcattgccttatccttttatcaagcgaaagggtttcaatgggtatgtgaatttgaagaagactttaaaggacacactttacagacggtcaaactggtactgaacatataaaagcgtccggccgcccaggaccggaacgcgaatgatcagtgataagccggaagccggtctttgtgcgcttcaaataagtcatcgcacaaagatatgatgtcattcatggaaagctcggcgctcgtatgcggatcaagcatggccgcctgatatacggcttccttttttaatgtaacggccgcttcgatggttaaaagctgtgtgttaatgtttgttctgttgagcgccgcgagctgctcgggaagttcgcccgaatagcacggcataatgtggtttttgacggctgtgcaaggcacttcaacgaccgctttcgccggcagattcggtatcagcccggtattcagcacattgccgccgaatgtgaacggtttgcccgtctccatcgcttcaataattctcgaaccgtattcttttgagcgttcatgcgtcaggttttggttgttgatgatgccgtctctcatcgtttcccaattgttgatttgttccgcgcatctcctcggatattcatcaagcggaatttggagttcatctatcagctccggataccggctttttataaaatacgggtgatattcggcattatgctcagatgattccgttacgtagcagccgaatttatccatcagctcaaaccgcaccatgtccttatgtttcgtcttttgtttttcgcgtgcccgtcttttaatttcaggatataaatcaattccgtcttttttaatctccaaaagccaagccatatggttgatgccggcaatgcgttcttccgtcccttcgtgatccatgccgagtgagtcaaacagatctttggtacatacctggacgctgtggcacaggccgaccgttttgacatttgtatgtctgagcatcgctccggtcagagaggccatcggatttgtatagtttaacagccacgcatccgggcagacctcttccatgtcttttgcgatgtcaaataaaacggggatggtgcgaagggaacggaaaatgccgcctattccgacggtatcggcaatcgtctggcggagaccgtaccgcttcgggatgtcaaagtcaatgaccgtcgcgggtttatagcctccgacctgaatggcgtttatcacatagccggcgtgtttcagcgcctgttttcggtcatcgtaggagatgatggatatactcgtattgtagcggtctctcatgttttccagcatgagctgggattctttcagccgtacagcgtcaatatcataaagcgcgaattcaaatccgtttaatgcttcagtcagtaagcagtcccccaatacattttttgcgaaaatcgtgcttcccgctccgataaatgtaattttcttcaacagaaattcctcccttttcttctcagcctttgaccgccccggaggacagccctgagataaaatatttttgaagcgccaaaaacaatacgaccatcggcagcatcgccatgatcgcggctgcggcgactaagtgaagattgttcgcgttttcgccgaaaaatcccgccatggccacggtcaatgtctgcaccttttgatcttgtaaaaagaaaatcgcaaattggtaatcgttccagataaacacgcaggaaataatgcagaccgttgcggtaatcggtttcaacaaaggaaacacgattgtataaaaagtcctgatcaatcccgcgccgtccatcctggcggcttcctcaagctctttcggaatggaagagcggataaaccctgaatataagaaaacggtcagcggcatatatgcagccgtattaatgagaatggctgcggcatgcgtattgatcagccccgcatcagcgaccatcttgtataaaggaaccatggaagtcaaaggcgggatgatcatgattgaaatcaaaaggccgaagacgattttgttcagctttgtatttcttcttgcgagcgggtatgcggcaagcgaacccatgaaaattaacaaggcggcggaaacggctgtaatgatgatcgtgttcagaaaggattgcccgagagaggcacgttcccatgcttcacgaaaattttgaaaagaaaaggcggatggcagcgaccattttgaactgtagtctccttttgcttttaatgacgtggtcagcaaaatataaaaggggacaatatgaatgcacgagataacggctgccaacagcgtaaaaatccgcattcgggctgttttcatgacatttccgtctcctttcgcttgaaatacacgagagccgaaaagctgatgacaagaataatgacggacataaacacgccttgggcggcggcatatcccgcatcctgccgtttaaaatataaatcatacataaacgttgacatcgattgagaggaattgcccggcccgcctgcggtcagcgcgataatgacatcaaacagcttcagcccgccgatgatattgatgaccatgttgatggtgacagccggcatcaataaaggcagggtgatggtgaaaaacggctgaagacctcccgcgccatccatttttgcggcttcgtaataatctttcggaatgctttgcagccccgccaaatatacaatcatcgcaatgcctgcgtattgatatgtgttaatcatgacgataatccacgggtttgccgcagggcttgccaaggcgttgacaggaccgattcccagtgcgccaagcacatcattcagcgcacccccgtcatatgagaaaataaaataccaaatgtatcccataatcagcggactgataatgacgggcaggtagacgatcgttcttgtgagcgccttcatttttaagctctgattcaagagcagcgcatataaaagtccgagcatattctgaaaaaaagtgcttccgatgccgtaaagcaaagtgtttttcacaacaagccacgtgtccggatctgtaaaaagccttttatattgagtgactcccacccattgatacgtctgtgagaagccgttccagtttgtaaacgtaataaaagcgcctttgacaaacggaaaaatcatgaaaataaaaaccgtggcaagggcgggaacgtacatccaccatagtgacgcggattttaccggcttttgatgttgaaatccttgggtttctcttgcaagatcactcattctttttcagctccccgtgaatcagattgaagccggagccgcttatattccctgccgagtttcgctgaaatttcagcgggggttaagatatcggccatcagctcctgcccggctgttcccatcacatcccacattccgtttggcaaataaaggcggtcaaaataaggctgcaccttaatatgctgatagcgcttatagtcatttgcgtagaaaatgtccgtttgcacattcactaatccggccggaagcgaggtcgcttcggcaattgattttgcatgctcgggtcgggccataaatgcgataaactgtttcgcttcttcaagccgcggggaatccttgaatgccgccagcgtgtaacgttcgcctccgatccaaaccggcgcgtctcccttgtggacggccggggtcggtatgatgccgacttttaccttcggattgatttgagcgacgtcttggccgagggtgccgccctgcagcgtaaaggcgattttgttttgcgccatcagttcaatgagctgggaccgttttgccgtcacggcatctatattgagcaggttttccttttgcatctctttcagtttgtcagataaataggtgaagtgtgtccagcggaaggttccgtttaacagttgttttttgtaacggtgtgcgggatctgtgatgagaagcggtgcggcgaattgatcgtaatattgggcaaatgagcttttctcatagccggcaaaccagaagggggtgactgttccgccgcttttttctttaatctgtctcagtgccttcataaaatcatccattgtttccggcggtttgattccgtatttttccaacattgtgcggttgtaggccagtccgtcctttgcctgattcagagggaaggcgtatattctgcctttggcgtctttgagcatgctgtttaaattcggatcgagccgcttcgtccaagacatgccgctgaggtcggcggtatattctccgtagcggattttggcccagccgtgtgtgtcgaaaagatcaggcatatcaccggccgccatcctgaccctcatcatattttcgtagtcattgcctgggaaatgaacgtttacttgaatgtccggatgttctttttggaatgaatcagccaactttctgaatacggcgcgttcgctgtctgaggatatggtggaatagactgtcaatgttttctgcttttctccggcgccgctctgttctgccgagcagccgggaagtatcatgcaagtaaaagaaagaaacaaagccagtaagcgtttcatcttttcctcctttaaatatgatataaacgctgcgggacacgtcacctcctttcttgtgagccgcagctttgtctgacaatcaatgaagtggggagcgtcacggccagcgggacggttctgccgtttaaacggtcgagaagcaatttgacacccgtccggcccatctcttccgtgtatacttttaccgttgataacggcgtgctggcgtattctgcctcatcaattccgttgaagctgacaaccgccgtatcgcgcgggacttgaaggccggcttcctgcaaggcttttaaagcgccgacagccatcgaatcacttgcgataaaaaaggcatcggggagacttccgcctttgatggcttcattcatcagccggaacccttcgtgcatgctgtattcgccgatcagtacatgctccggctcggcgccggccatttgtaagaaagcggtcagacgcttatcctcaatcgttttattgctgtttacaccgtctatgacggtatgctcccgctcccggccgccgatataaccgagccgttggtaaccgagcgacagaagatgttctatcgccttctgcgctgcggcataaaaatccacgctgacggaatcgtagcgggcgggatcgggggtgccgttaacaaataccgcgtgcctgaaaacggcgctgatattcgtaagcgcctcgtcttgcaggctgccgatgacgatgacgccgtccagttcgtgaaacatatgctcttgaaaagaaccgagatggatagaagatgtgataaaaattttttgccgaaagcattcttcctcaatgccttttcggatcgccgaaaaataaggatcctgccgttcttcttccggtgacaggcagctgacaacgccgatcaggggcgctgaatcgctgcggctgcggttcttccgtctttttgccgacggctgatagcccagctcatcggcgatcctcagaactttttctcttgtttcatcagtcacagccaaagagtcatccttattcaaaattctcgatactgtcgcgctggatacagatgcctgtaaggcaatatctttgagacggaccatttcgcatctcctttttactaaatatttactaaacagaaatgaactggttattgttaaaatgatattatcatacgagagtaagcgttttcaacaactattttcggttacttttagtaaaaatcagtaaaaaagaaaatctgtttttctctatcatatttcaattgaaccggaataaattgatagagaaaggagagggtgatgtgctgaagatagctgtttttgatgaggagcatgaaaaggatctgcagactgaagtcaatacatttttaaaggggatttctgatgaacagctcgttgatattaaatatacggtagcggcggcctgtgatcctgaaggtgagcagctttattgtttttccgctctcattttataccgaaaataaagaagcccggacgaaatgccgggcttcgttgttcattatgcttttttgacgcggggacttctcggtttttggtatttctccgcttgtttgattccttttctttcgctcgctaatgatttgtacagagacacgatcatcagaaggatcacgactgaaaacggaaccgcggcgagaatggccgtgttttgcagtgcggccagaccgccggaatataataatacagctgccacggcggactggatgacgccccagatgattttcacccggtttgacgggtccaaagagccgtaagacgtttgcattccaagcacaaatgtcgctgaatccgctgatgtaataaagaatacagcgatcagaacaagcgttaatacggatgtcaccattgtcagcggatagtggctgagtgcgccgaacagcatcgtatccgttgacatacccgcgacattgaatacgcctttctgctgaagatccatcgcggatacaccgaagatcgcaaaccataagaaagccaatatacaaggtgtcaccaataccccgattaaaaattcccggatcgtccggccccttgatacacgggcgataaaaatgccgacaaacggcgaccaggatatccaccaggcccaatagaaaatggtccagctgttaatccattcgcgtttttggggatcattcggagacaagcgaaagctcatctgcacgatattttggatgtattggccgatagaatcggtaaatgagttcataatcagcaccgtcgggcctgcaataagcataaagatcattaaaatagccgcgagcgccatgttggtattgcttaagtatttaatccctttgccgatgccgctccacgcagaaatcaaaaataacacggtcacgacagcgatcaggatcagctgaacggaaaatgttttcggaatgccgaataaataatgcagaccgccgttgatctgagtcgctccgagccctaagcttgtcgccacaccgacaacggtcgcaaacacggcgatacagtcaatcgctttgccgatcggcccgtttactttatcgcccaaaagcggtgtcagtgtgctgctgatcaaaccgggcgcgtcttttctgaattgaaaatatgcgatacataaagcgacaaccgcatagatggcccaagcgtgcagcccccagtggaaaaatgtgtaccggagcgcatcacgaaatgcttggggcgtttctgtttcacctgagggagagctgatggcgtaatggctgatcggttccgcagccccgtaaaataccaaaccgattcccatgcctgcgctgaaaagcatggcaaaccatgataataagccgaattccggtttttccccgggttttccgagttttattgtgccgatcggacttacaatgagaaagagacagaaaccgacaaatatagaaacgaccagcagataataccagccgaaagaatccgtaataaatttttgtgccgtatcagtgacttgctgcaggctgtcaggagaaatggctccccataaaaccgcagcggctgtgatgacaatcacaatccaaaaaacactggagatgttcttcttcaaacgttctcaccctctgactatttttttcaatacgccattttgttttagtatggtcgtacgattgcagatcaatcctttcttcctattccctcaatcaggtgaaacaaaacgcagaaaactctatcatgtttttggtcaattatcaatggggacgctcaggtaagtgcgctttaaactatttagagcgagcgtgagaaacgtcctgcattcaaaccggcgagacgccccgtgacaaaggctgaagtgatattgtagcccccggtatagccgtgaatatcgagtatttctccgcaaaaatataagccttccattttttttgacgccatctgtttcggctcaatctcttttacggaaacacctccgcctgtgacaaacgctttgtccaaagaaagcgttccgtcagcggcaaccgtaaattgtttgcagtctttgacaaaagccctgaattgatccttcggcaattccgtaaagcttgtctgcggatcaagaccgttccgttccagaagaaaaagcaggtaccgttcctgcatccacggcttcagcgcatttttgagcgcttttttcggtgcgtctttcagttccttgtgcatcttttgaaataactcttcctcgttgatgccgggaaacagatcgatgcggagtttgacctctggctgctttttcagttctttgacgacaaactggctgcagcggagaatggcggggcctgacaagccgaaatgggtaaacagcatgtccatcacgtgtgtgacgattggtttgccttttttattcagaacgctgacggccgcgtttctaagagacagcccctgaagtgttttttgtttaataaacggttctgacgacgtaaccggcacttccgtcggaaagagttcggtcacggtatgaccggccgcttccgcccatgcatagccgtctccggtgctgccggtatgcgggactgattttccgccgaccgcgataatgacggcgtctgcgttaatgtgttcgtcattgtttgtcgtaatgcctgctgtcctgccgttctcgtaccgcacttctttgattttttcatttgtacggatggtgacattcagttgttttaatcggttcaaaagcgcatcgacaacgctttgtgctttgtccgtcaccgggaacatgcgcccgtggtcttcttctttcagctgaatgccgagtttttcaaaaaaggcgatgatatcttcattattaaattcggaaaacgcgctgtataaaaagcggccgttgccggggatgtgtttgatgatttcttcaacggggaggcggttggtcacgttgcagcgcccgccgccggaaatcgccagcttccgtcccagcttgtttcctttatcgattaataatacgtccgcgccttcttcgcctgccgcaatcgcagccattaaaccggacgggccgccgccgatcacaatcacgtcataatgtttcatctttcatcaacaactttctttttcacgtataataggcggaaatgtccgctttctgctattatagcgaaagaaagggaatccttaaacgtattttgttttttaaagagttttcccaaaaagtttcccgctgtaattattaccgtctaattgcccagttgtgttaaaatagaaaagttgaatcttcgtagaaaatggtgatgaggaaacatgtcaagcaaattgttaaggggcacgttcgtgctgacgctcggcacctatatatcgcggattttagggatgatttatctgatcccgttcggagcgatggtcggagcgacgggcggagctttgtttcaatacggatataatcaatatacactgtttttaaacattgccacgatgggatttcccgccgcggtttcaaaatttgtctcgaaatataattccaagggagactatgagacaagcaggcggatgctgagagcgggaatgtcggttatgctcgtaaccgggatgatcgctttttcaattctttatatttcggcgccgttttttgcggaaacatctctcggcggcacgagtaacaacggacttacgattgaccacgtcgtttatgtcatccggatggtgagtctggcacttttggtcgtgccgattatgagtcttgtgcgcggttttttccaaggtcatcagatgatggggccgacagccgtttcacaggttgtggagcagcttgcccggatcatctttttattgggcgccacgtatttgattttaagagtgatcaacggcggccttgtcatcgcagtcggatacgcgactttcgcggcgctgatcggatcattcggagggcttgtcgtcctttatatttactggaataagcggaagggcgatcttctggcgatgaagccgaatctcgtcccgtctgcgaacttaagttataaaaaaatgttcattgagcttttcagttatgccgctccttacgtatttgtcggactggcgattcctttgtattcttatatcgatacgaatacgtttaataaagcgatgattgcggcaggccataaggatatcagccaggacatgcttgcgattgtcactctttatgtgccgaagcttgtcatgatcccggtttctctggcgaccgctttcggtctgacgctgattccgacgattactgaatcgtttacgagcaggaattataagcttttgaaccagcagattaaccagacgatgcaaatcattctgtttttggttattcccgcagttgtcgggatgtccgtgttatcgggtccggcctatacgttcttctacggctctgaaagtcttcgcccggatatcggacaggatatattgttctggtacgcgcctgtcgcgattctgttttctctgtttaccgtaaacgccgcgatcctgcaagggattaataagcagaaatttgctgtcgtgagccttttcatcggcgtcattataaaagtggtgctgaacgtgccgctgatcaagctgtttcagggagacggggccatcttggcaacggcgctcggttatatcgcttctcttctgtacggttttattatgattaagcgccatgcgggctattcgtatacggtacttataaaacgggtcattttaatcgcagtcctgtccgtcgtgatgggagtcgcggtcaagctgactcaatggctgctcagtttctttgtaacataccaaagcggccaggtgcatgcggcgattgtcgtctttgtctgcgccgctgtcggcggtgcggtgtacatgtttgccgcgtaccgaatcggatttttacagaaaatgtttggaaaccgtctgccccgcgttttaaggagaggcaggcattccgtccattgagaaataatgaatagtccgcttatcgcgggcttttctttttaaaggagaggatcaggatgagacttgataagctgcttgccaacagcggattcggctcaagaaaagatgtgaaaaaaatcgtcaaggccggggctgtcatgattgacggagagccggcgaaagatgtgaaaacccatgtcgatccggaaaaacaggacatcacggtatacggagagccggcagactatcgtgaatttatttatgtcatgatgaataagccgcaaggagtgctgtccgctaccgaagacagccgccagcaaacggtggttgatctgctgacgcctgaagaacagcgatttgaaccgtttccggcaggacgtcttgataaggatacggaaggctttttgcttctgaccaatgacgggcagctcgctcatcgcctgctttctccgaaaaagcatgtgcctaaaacatatgaggtccggttaacctcgcctctgtcaccggaagacatcgttcatctggaaagaggcgtcgtcattgaaggaggctataaaacgaagccggcagccgttgaaatcattacagaaagcccggatgaaacggtgattcacttgaccattacagaaggcaaatatcatcaggtgaagctgatggcaaaggctgtcggaaatgaagtggcttatttgaagcggctttcgatgggggctgtttctcttgacccggatcttaaaccgggagaattccgcgagctgactgaagaggagctcgaaacgctgagaggcgctgaagtgtaatcgatatcagaaaagcccaaaacagatttgttttgggctttttatatagaggaacaaaaaacaaggcaaagacgctgctttgccttgcagcatgtcaggccgaaaagggccttatgtaattgttcgcttaagatgtaattttcactttttttcgtgttgtctcccacttgcctcggctaggactatgaacaagatcattgtatgctaacacatttaagtctcgctgaatggttctaggtgtaatgccgaattcatcaaccagttcctgtgttgtcacaaggcctttttcctggatgaacatgtaaactgatttaatccgagtcagcatacgatttgttgaaggtttcaaaaaaccactccctatcataagatcggatggacttgatataccacaactttcgactctaaaacttcgtacgaataagcaacaaaggatgacattctgttttttctcttttaactgcctccattatacacgatatggacaacatgaatctaggaataagcgcagataattttttccaaatgggtgccgccttggtgcattactatgctcggtccgcttttattattatggaaactgaaactttttttatacatgtccgtatgaaaacgggggagtgagaagtttgggagaattattgaatgcaaacattgtctgcgccggttatgctgacaggccgaaggtgatttctgatgtatctctgtcagtcaacgctggtgaaattgccggtttaatcggagcgaacggcgcggggaaaagcacagtgataaaggcggttctcgggctttcccgggatatagaaggcggtattgagtggaatgattcatcttatgcttacataccggagcgtccgagtttttacgatgaactgacgctttgggagcatctcgagctgaccgggtcattgcggggtatagaaggggaagaatgccgtgagcgggcagggcggctgcttgaagagttttcgctgacgtctgtaaaacatgatttgccttccggtttttcaaaagggatgcagcaaaaattgatgctcatacaggcatttttggcgaagccggatatttacatcattgatgagccttttatcggacttgatccgatctcaacgaagctgtttaccgacatgctgattgctgagaaagaaaggggcgcggggattttgatgtgcactcatgttctggatacggcggaaaaaatctgcgaccggttttatttgctggatcagggcgctctgcttcttcaaggcacgttagaggagcttcaggaaaaaacggggagccgttcactgctggattgcttttattcagcggttcggagcagtcagcgatgaccgggcgggctttgttttttcaaaggctgtttcattattggcggtatcaatggaaggtgtttcagacggtcattgattggacggtcgcgctgtatatcgttcttcccgctgccgcatttgccgtttatcaatatgctgaatggctgaacggcagggggcttcttaatggagctgcaggagtattaggatggggctggctgtatgtattcagtgccctgctgttgtgcacgggttttattcatacctttttgctggaagcggatcacgtatttttggtgcatgcaaaacatctgatgcaaaagctgaaacggtacgcgcttttgtattcgatgttcctttcccttatcaaatggggtgcgcttgccgtattgttatttcccttatggcgccagtacggtgactgtaccttaccggcatattcgggtatgttttgctgtctgttcggcttccatactgcaatattagcggtgcaccggcacagaaaaaacagcaggcggacattcgggaatcaggcggcgggctggctgaaagtgatggttctgatggcgggtgcgttttttatgatcgtctttgccgccgaatggtattggctttggccggcgggatgtatattgttcatctgttccgctcttttgacttggaaagggacggagacattatcagcctttgaggaagaagtgcttgaggagaacaggcgcaagctttctttcgcagcctctgttttgatgctcagccatgatgtgcagctcccgaatggtaaacataaagggcggagcaagccgtttttatatccccgctcaaagcacatctttacaaaacggtcggcgtatacggcgtggaaagaattgttctttaaagtgctgatccgaaacggcgggtatctccggcagctttaccttttaaccgcggcttttacggctcttattctcgttcttccgctcttagtgaagccggcagtcctcattttgtttgcgatcgtcagccgctatgccgcgtcgcttatatttgaccggatcacggacaaaccggttttaagcggtatcaagagagacagtgatgactatttcagggcgcgaaacagcgcattaaccgtcatccaagtcatctgttccgcctggtgtctcattgccgcgattctttccgttctttatatgtgaaaatccctttccgaaaaaggaaagggatttttcttaatgtccgttcaaaataaaaagctgaataaaaaacagcacggcgaagatgatgactaaaggatggatttcgcgccattttttcttagctgctttaacaagcggatatgaaatgaagccgagtgcgatcccggttgaaatactggacgttaaaggcatcgccaaaatgacgagaaaggccgggaacgcttcatcaagctcattccagcggatattcgataccgcacccatcatcaggctgccgactataatcagagccggtgacgtaatcgcggacacttccgataagacgctgacaagcgggctgaaaaacatggaaacggcaaacataacggcaatcgtcagcgccgtcagacccgttcttccgccggccgccacacctgctgaagattcaacgaacgcggtcgtcgggctggtgccgaagatgcttcccaccgtcgtagcggtcgaatcagccaacagcgctcttctggcattcggcagctgattgtttttgatcaatcccgcttgttcggcgacaccgatcatggtgccggtcgtgtcaaaaatcgtaacgagaagaaaagaaaacacaacggcgtacagaccgtgatgcacgacatccccgagggctccgaacggatttgtgatcaaaagcccctccggcaggtgcgggaaggacatgaatcctttcgcgaaatggatctgtccggtcaaaaaggcaatgatagcggtcagcgccattccgatgaacagagccccgtttacattcagcaccatcagtacaatactgatgataagtccgataagcgttaaaatgacggcgggcgaatgaagatcgccgagtgcgaccagattagatttatcagccgtgatgattccggattggcgtaagccgataaaagcgataaataagccgatgccggtcgtaattccgtattttaaattgtccggaatcgcttctataagttgttttcttaaaggcgttaacgataaaataataaagatgactcccgcgataaaaacggcgctgaaagccgtctgatacgtaatgccgctgcctgtgccgacaacgtgaaaggcaagatacgcgtttaagcccatgccgggggcaatggcgatcggaaaattcgcagcgagagccatccataaagttccgacaatggaagcgataatcgtcgcggtgaacacctggtcaaacggaattcccgcattggaaaggatcaccggattgacgacaatgatatacaccattgtgaaaaaggtggtcaatcccgcggtaatttctctttttattgtcgtttgatgcttgtcgagatgaaacataagtacctccaatgacgaacattttttcaaaacatcatctatattattcgttttatcgacattttgcaagtctttatcaagaaaggggatttgtgatgaactgggaagttgaagtcatcagaaacaaagaagatctgatccgtgacacgcagaaatttttgcagatcaacagcgtaatggacgaatcaacagccggtcccggccggccgtttggagaaggcgtcaatgccagcctgacgtcactgctggaattcggtgaaaaagaaggcttcaccgtgaagaatcttgatggctatgcgggccatattgaatggggaacgggtgacgaaatcgtcggcgttttgtgccacgtcgatgtcgttccgcccggagacggctggacgagcgatccgttttcagccgatatcagggacggccggatatatgccagaggcgccatagatgataaagggccgacaatggcggcgttttatgcgctgaaaatcgtcaaagacatgcagctccctttatccaaacgcgtgagaatcatcatcggaacggatgaagaaagtgattggagatgcgtggatcactacttcaaacacgaaaaaatgcctgacatcggctttgctcctgacgcggattttccaatcattaacgcggaaaaaggaattatagatgcatcactgcgcattgtaaaaagcgcttctgacaaagacgcaaaaaacgggcttctgtcattccgttcaggactgcgcttgaacatggtgccggatgcggctgaagcggttattgaaggggacggtcttgatgccgtgcacgcatatttcagcaaatggcttgagcagtcaaaaacacagggtgaagcagtttcggaaaatggaaaactgacgcttcgggtatacggaaaatcatgccacgcgatggaaccggataatggtgttaatgccggcttaaagcttgctgaatgccttaacggaacagatctggatgaagccggaaaggactttgtcaaaaccgtcagtgactattttttaaatgatacacgaggcaaaaagctgaaaattgattgcagggatgacatcagcggagagcttacattgaatgtcggcacctttacatacagaaagggtgaggaaggagaactcggcatcaacatccgttatcccgtcacttcagacagcaaagtcatccgtgatgcttttacgtctgctgaagaattccggcttgaagaatttaaagacagcaaaccgcaccacgtttctgccgatcatccgctcgtaaagacgcttcaaaaggtttacgaaggacagacgggaaagaaagcggatctgatttcaatcggcggaggaacgtatgcgagatccctttcggcgggcgtcgcgttcgggccgctgttccccggccggcctgacagcgcgcatcaaaaggatgagtatattgaaattgatgatcttctccggtcaaccgctttatatgccgaagccatttatgagcttgccaagtgataataaaaagggacgccgaaagcggcatccctttttatcattcaaatgaccataaatccgttgataaataacgttctcccgtatcggccgtcatacagatgacgatctgttcggaagggagtcgttttgcggtttcaatggcggcgaagcaggcggcgcctgaagacggtccgacgagtatgccttcttcccgggccagacggcgtgttgtcgtatacgcatcttcatcagatattttcatgatttcatcgtaaacgtcctgattcagtatgccgggaataaatccggggcttgtcccgacaagcttatgagcgccgggttttccgccagacaggacgggagaccccgcgggctcggcgacatgaacaatcatatccgggaaaagctccctcagcgtttctccagttccagtaatggttccgcccgttcccgccgttgccacaaaagcaccgagcggtctgttgagctgctgaacggcctgatagatttcaatggctgtcgtttttcggtgggcatctggatttgcgccgttatcgaattgcatcgggataaaacttcccggaatctgttcggcgagttctttcgcttttttgatgctgccgggcattctttccgcccccggtgttaacacaacctccgcgccgtacgctttcaggaggttgatgcgttctttcgtcatcgtgtcaggcatgacgaggattgccttgtagccgcgcgctgccgcgttcatcgccaggccgatgcctgtgttgccgcttgtcggttcgatgatgacagagccgggttttaaatgcccgctgttttccgcctcaatgatcatattgtaagccgctctgtctttgacactgccgctcgggttaaacgattctaattttaaatagacctgcgctgcatgttctggctgaaggcgattgagctttacgatcggtgtgccgccgatcagctccgccgtgctgtttacgattttcaaggccggctcattcctttctgtataaaacgttcggtacataatatcctatcataatgagcggacagggttctcctctccgcttatccgttttataataacaccataaccaaagagggggagatcctcgtatgaaagcttcattgccgcattattttatcggcattccgattccggctgacattgctgaaccgatttgggaagcagccaaaaaggagccggcgttaacattcaaaaaatgggtgcacccgcatgactatcatattacactcatttttctcggagccgcggatgaagaacggcttgcgaaattatcgtcgctgctcgcagatgctgcgtcggcagcgcagccgtttaccgtacagtttcagcatctggatattttcggcgaccgcagacagccgagagtgcttcaccttgagcccgaacggaatgaactgctctttgatttgcgggaaaaaacaaaacaggctgttttgaaagccggttttcaagtggaaaaacgcccgtatcaccctcatatgacgatggcgcggaagtgggcgggagaccggccgtttcctgacgatgtgccgtttgaaagcggcagggtgcaaagtgccgtcagccggttttccctgtttcagacccatcttgaccggtcgcctaaatacgaagaaattgcacagtttcaattgacataaacaaatattcggagtggagaaatcacatggcacagatcatcaaaattcacgactgcatatccagatatgaacttgatccatatcattatatgaaccagtttatccggctgaagaaagaacgctgggaggcgcttcttgaagcgtttgaccggatgacggaagaaaaagaaacggaaacggctgcaggcggggaaaccgatcaagcgccagccaggaaaaagttttccttaaaaaagagaaaagaagaaaatacggccgatataaatgaaaagaggcaccaatggtttgatgagccggagggagaagaggcgctgttcgggaatctcccgactcgaaagtctgagctcgcgccttttttcaaagatcagctgtatgactttcaattaaaatgggcgagctccacgctttctcaaaagtcagagctttcgcaggcggtcaaaagggacgggatgttaaaaatgctggctcaaaagctgcccgattcctattttgtgatgtatcatccggttctgcaaattcagcaggcgtccgtcgaactgagcatgatcatcatctcgccgctggagattttctgcgccgcttttatggaagcggaagaggacagcgtatatatcggatcaaaacaccgtttttgggaagaaaggggctccggcagcacgcgccaagtattgaatccgtctctcagcctgcaccggacgggctcggtcgtttcgcaaatcgtaaaagaaaagcaggccgacattcccgtgcggaagcttttgctcagcagaacgtcttatattgattatccggagccgccgtacgggctggaaatagctgataaacggactgccgcagagtggctggaaaagcagcagaaaaatacggcgccgatcaagcaccaccagctcaaggcggcgaaggctcttttgtcttacggcttaagcgattcaagccggagacaggaatggcttgattaaaacggacgtttgccggctgtctcttcatctatgaagcaggtgaaaacaaacgatgagtcaatggttttttattattaatccggtctcaggaggcgggcggggccggcgtgtctggaaatcagttcaaaaagagctgaacaggcgcggggtcagccaccgttcttttttgaccgggcatcccggacatgcggaagtgctggcgagacagatttcaatgatgcaggatcataagcttaagcggctgttcgtcatcggcggtgacgggacgatgcatgaagtcattaacggactgaaaggaacggatcagattgagctgacctttgtgcccgccggttcgtacaatgacttttccaaagggctcggtattaagaagtcggcgctcctccaagaaatcaaaagtctgcaccgcccgctcacacggaaattttttgcgggaaacatcaacttttttcatgacaaagcgcaatcactttattttattaaccacctgtctgtcggcttcgatgcctcagttttgaaggcagcggcgaattttccgttatcgcgcgttcttcggtttttgcgtctcggctttgtgatttacccgctcgcgcatttacatacggcctcggggtttcagccgttcagatttgtttgcacggcagacggccagaggcgagaattccgcaatgtctggtttgtcatagcggctaatcacccttattacggaggcggcatgaaagcggcgccttcagcaaatccccgtcaaaaccattttgatattgtcgtcgcagaaaacctgtcctttttctcgctgtatcgttttttatgggcgatgagcttcggccggcatatcaaaatggacggagtgacgatgataaaggggaaggaattcgtttttgaaacagatgggaaaattccgtttcacgctgacggcgagctgatcggaacgacgccgtttcggcttatgccgggcggtgcgccgttgaaaataaaaacataataaacaaatgaaacccgtcaaatgttttacggcaaagagcggttcgcggcataaatcttcagaattcacaggtgttcttgctagttttgcttgacgaagtttgtgctgtagcgctaaaatttataggacggctattgattagcatatgagactctcaatagctgtcttttttattctcatgaaattgtttatgacaggccgctccgccaatagagaaaggctggaggcctattctaaaatattttaagaaatgatgggttgaacattgatatgaactggttgggacaattactaggtagcgattgggagatcttccccgccggaggagctacaggagatgcatattatgcgaaacataacggccaacagctttttttaaaacgtaatagctcgccctttttagccgtgttatccgccgaaggcattgttccgaagctggtttggacgaaacggatggaaaatggagacgtcattacggctcagcattggatggcgggcagggagctgaaggcaaaggatatgagcggacgcccggtggctgagctgctccgcaaaatccacacatcaaaagctttgctcgacatgctgaaaagattgggaaaagaaccgcttgatccgggcgcccttttgtcgcagctgaagcaggccgtctttgccgtgcggcaattttcgccgcttattcaggaaggccttgcttatttggaagctcatgtggatcaggtgcaattcggtgaaaaagtcgtttgccattgtgatgtgaatcataataactggcttctgtctgaagacaaccagctgtatttaatagattgggacggcgccatgatagctgatccggccatggatctcggccctttattgtatcattacgtcgaagagccagcgtgggacagctggcttgggatgtacggcatgaagctcacggaagggcttcggctgcggatggcgtggtacatgttatcggagaccatcaccttcatcgcctggcacaaatcaaaaggaaacgacaaagcgtatcatgatgccatggaagagcttcatgccctgatgaagcggattgtcaagtagtcaggagtacgaatccatctgctccacccattgggacaaatggttttggtgctcctgaatatgcgtgtcgatggaatcggccgtgatgccggactggctgtagcggtagacatcctcgagcacgttttttatatttgaatcaagcccggtgttggccatcagtgatttgatgacgcgctccagctgttcatactcggcaaccgtgccgcagcaatccaattgatggtcggccagtatgtcctttaataaccggacctgatgttcgcttgttaagcccatgattcatatacacatcctttctgtgtcatacattgtgcaaagcggtgcggttttatgcatcacatgagtgttccggaccggggagcctctttttttatgcagccggcgcctttaaaagacgcttgcggctctttatgtttcatggtatgttgttactcgaaattatagatagaggtgtcaatcatatgagaatgcgccataaaccttgggcgaatgattttctggcagaaaacgctgacatcgccatcagtgatccggcccagtataaagggcggtggaacacggtctttggcaatgacaacccgatccatattgaagtcggtacgggaaaagggcagttcatttcaggaatggccaagcagaatccggatatcaactatatcgggattgagctgtttaaaagcgtcatcgtcactgccgtccaaaaagttaaggacagcggggctcacaatgttcgtttgttaaatatagacgcggaaacactgaatgacgtatttgaacggggagaaatcaagcgcgtatatttaaacttttctgacccgtggccgaaaaaccgccacgaaaagcgccgtttaacatttaaaacgttcttgaaaaaatacgaagaagtgatgggcgaaacaggtgagattcatttcaaaaccgataaccgcggtttattcgaatactctctgaaaagcttttccgaatacggcctgcttctgacggaagtcagccttgatctgcacaacagcgatccgaagggcaatattatgacagaatacgaagaaaaattctccgcgctcggccagccgatttatcgggccgaagttgaatggagaacaaaagacagactctgatgcgggagtctgtttttttatgccgccatttgctaccattacatcaggagggatcaagatggagacattgaatattgggaatatttcattaacatggctggacggcggtgtaacacatatggacggcggagcgatgttcggcgttgtcccgaaacctttatggtcgagaaaataccccgtaaatgacaaaaaccagattgaattaagaacagacccgattctgatcagaaaaaacggcctgaatatattggttgacgcgggtatcggccgagggaaattctctgataaacaaaaaaggaattacggcgtaacacaggaatccaatctgaaacaatctcttcgtgacctcgggctttcttgtgaggacattcatattgccgcgatgacccatcttcattttgaccatgcatgcggcctgacggagtacagcggagaggagcttgtctctgttttcccgaatgcccgcattatcacttctgcaacagagtggcgcgaaatgagaaatcctaatatcagatcgaaaaatacatattggagagaaaattgggaggcggtacaaggtcaggtcgaaacctttgagaacgagtatcagctgacagaaggcattacgatgcaccacaccggcggccacagcgacggccacagcgtcatcgtcttagaagacggtggggaggcggctgtgcattttgccgacctgatgccgacgaatgcgcataaaaatccgttatgggtgctggcctatgatgattatccgatgacctctattccagaaaagcagaaatggcagacgttcgcggcagaaaaagacgcctggctgattttctatcacgacgcgatttacagagcggtaaaatggggagaagacggcgaagtggctgcatctgttaaacgggagaaaaaataagcggatcgatgatttgcctgtatgaatttcgggaataaaagcaaacctaagacaaattgctttgaaaggaagagacaggtgaatcaatttcaagtgacgaaagatggagaaatcaaaacaactctgcgcggattagaagtgctttctacgccttttttaaataaaggggtggcctttacacaggaggaaagaaaggaactcgggctcgagggctttctgccgccgaaagtattgacaatcgaagagcaggcgaggcgggcctacgaacaattcagttcgcagcctgatgagctgagcaaaaatgtctacttgaccgctctccatgaccggaatgaaacgttattttacaggctgttaaatgatcatttaggcgaaatgctgccgatcgtatatacgccgaccgtcggcactgcgatccagcgttacagccatgagtacagaaaaccccgcggtctgtatttgtcaatagatgatcctgaaggaatgcgcgccgcatttcagcagttcggaaaaaatgaaaacatagacttaatcgttgccacagatgcggagggcattctgggaatcggtgactggggcgtcggcggcatcgccatttctgtcggaaaactcgcggtatatacggcggcggccggaattgatccgtcacgagtgcttgcggtcgtattggacgcggggacaaatcaggaaagcctcttaaatgacccgctgtatgtcggaaaccagcattcaagagtgcgcggcgagaaatatgaccgctttattgatgagtatgtctcgcttgcccgggaaacattcccgaatgcgctgcttcattgggaggatttcggtacggctaacgcccgcggcatattaaaacggtataaagataaagtctgtacgtttaacgatgacattcaaggaacgggcgcggtatcgcttgcagctgttttagcgtgtgcaaaagcatcaaaagtgcctttaaaagagcataaagtcgtcgtcttcggcgcgggaacggccggtatcggaattgctgagcagctgcgcgaagccatggtgcatgacggattaagcgaagaagaatcctacagccatttttggtgtatcgacagaaacggattgttaacggatgatatgaaggacttgcgtgattttcaggttccgtacgcgcgccctgctgatgaagtgaaagagtacggccgcagcggtgaaggcggatcaattgatctggcggagacggtgcgtcaggccaagccgacgattctgatcggcacatccaccgtatcaggcgcatttacggaagaaatcgtcaaagaaatggcctcgcatgtcaaacggcccgctattttgccgatgtcaaacccgacgacattatcagaagcaaaacctgaagatttgattaaatggacggaaggccgcgcgcttgtcactacgggtagtccgtttccgcctgttgcgtataacggcgttacctaccatatcggacaggcgaacaacgcgctcgtattcccgggactcggactcggcacgattgtgacaaaagcaaggctcattacggacaatatgttcgttgcctgcgcgaatgccatcgccggtatggtggacgtcggcaagccgggggcgccgatgcttccgaaagtggaggatctcaggacggtatcggcaactgtggcggtagctgtagctaaagctgcgattcaggacggtgtagcggaaacggaacccgaggatctgatccaagcggtgcaggacgcgatgtggcaccccgtatataaacgaattcggccgatgtaaccgaataaagcccaaaacgctgatggttttgggctttattttttgcttgtccgaattatgaggcgacagaatcaatgacatcgacaatctggcctgtttttgcattgaccataacttcatattgctccagttcgccgaatgccgaacgtgtcacgccggtcttgtatacctggatggtttctccgtttacctggtagggctcgggctctgtgtaaatccatgatccgtctatcggcccgcgctgtttaaaagccgctttcacgatacggagcgctttttctgaagagatataaggtttcatcgcatactttttcactgcgatggcagcgcataatccgactcctgcacctaagagaaaatgacgtaatttcaatatgaagcacctccaattatgtcgtagtttttattatacagaagatgccagacggtgttaagtaaagcggcggttttccagcccattcaatctgagcgcttggaaaacggttgtttttctaataaaataaaagcattacatagaaatgaggggaaaatatgaatgaggaaacgaaaacgcttttccggacgctgacgcagcttcccggcgcaccgggaaatgaacatcaggtccgctcctttatgaaacgggagcttgcgaaatatgcggatgacatcgtgcaggacagactcggaagtgttttcggagtaaggcgcggcgctgaagatgcgccgaccgttatggtagccggccatatggacgaagtcgggtttatggtaacgcagattacggataacggcatgctgagatttcagacgctcggcggctggtggagtcaggtgctgcttgcccagcgcgtcgaggtgcagacggataacggaccgattatcggcgtcatctcaagcatcccgccccacattttaacggatgcccagcgcgcaaagccgatggagatcaaaaatatgatgattgatatcggtgccgatgacagagaggacgcggtcaaaatggggatcagaccgggacagcaggtcgtgcctgtctgcccgttcaccccgatggccaacgagaagaaaatattgtccaaagcgtgggataaccgctacggctgcgggctaagcattgaactattaaaagagctgcacggaaaagacctgccgaacaatctgtacgccggggccaccgttcaggaggaagtcggcttgagaggggcgcagacagcggccaacatgattcagcctgatctctttttcgcgcttgatgccagcccggcaaatgatatgagcggcgataaggagctgttcggccgtctcggcgagggggtgctgctccgcattctcgacagaacgacggtcatgcaccgcgggatgagagagttcgtccttgatatggcggaaacgcacaatatcccttatcaatatttcgcttcaggcgggggaacggatgccggacgggtccacatatcaaacagcggggttccgtctgccgtcatcggcatttgttcaagatacattcatacaaatgccgctatcatccatgtcgatgattatgccgcggcgaaagaaatgctcattaagctggtcatggcgagtgacaaacagacggtcgaaacgatcagagaaaatgtgtaaaaaaataagcaggaccgcataaaggcggcctgcttattctgtttcaaataaataagagagtgctttcatcgcttgattgacggtttcgaccgtgatattcgcttttccggaaagctctttcagcggatgatgaagttctttcggacggatgagaatgagcggctttccttttgcgatggcataagaagcatccatcgcggtattccactgcttatatttctcgccaaacagggcgatcacaaaatcggctttttccatcagcacctctgtacggaaattgttgatatcagaagctctggcgtcttttaaaacagaatcgggctgcacgcccataatctcttctccgatattgtctgagcgttcatggttttccatcgggccgacaaacgtaatcggcaggtccagcgctgttgctttttgcttgatctcgtcccgccaattactgtggatttcacccgctaaatacacgacaaactgcatcttttgcccctccttatgtacatattcagattttcgtacggctacaagcaaaatggtaaacgaaacttgcttgataatgcaaatgaaatatgataatgatattgcatatagttggtcttgccgtaaacagtctggtatgatccaattggacaaacatcagcatataaaaaactcataatccagatggaggaatgacaatgaaaaagattgaaagcacggaagaattgcaaaaagcggtacaagacgattgggcggtatttatgttttcagcggattggtgcccggactgccgctttgtggagccgtttctccctgagctggaagcggactttcctgaattcacttattactacgtagaccgcgatcaatttattgatacatgcgcggaatgggaaatttacggcattccgagctttgttgtgtttaacggaggaaaagaagtgaaccgcttcgtcagcaaagaccgtaaaacaaaagaagaaattgagcaatttttaaccgattcccttgctaaagcataaaggaggccacgggctttgaaaatgacgtcaaggaagctggcggatttattaaaacagcgcctgcagcacgagaaccgatccttcttttttgacagagaaaaagacaccctccgtgttgaggatcaaacgaccaaaaaaggcatcacattggagctcccgccgatcattgcgaagtgggagacgaaaaaagaagaagcgatcgacgaaatcgtctactatgtgtcagaagcgatggaggcgatggaaggaagcggacaggagatgtccggaaaggaagccggtatctatcctgtcatccgctccacgtcatttcccgatcaaacgagcgacggcattccgctcgtgtatgatgaccatacggccgaaacgagaatctactacgcgcttgacctcggcaagacgtaccgcttaattgacagccgtatgctcgagaaagaaaactggacaaaagaacggatcagggagacggcgtcattcaatctccgctctcttccttcagttgtgaaacaggatacggttgcggacaattatttttattttttcagggcgaatgacggctatgacgccagccggattctcaatgattcgattcttcatgaatacaagcaggccgctgaaggcgaattggcgatttccgtcccgcaccaggatgtattaatacttgctgacattcgaaatgaatcgggttatgatattttagggcaaatgtccatgagcttctttgcaagcggcacggtgccgattacggccctttcatttctgtataatgaaggcagactggaacctgtgtttatcatggcgaaaagccggccgaaaaaggattagaaaggatttttcttatgaacgctttttacaataaagaaggtgtgggagatacgcttctgatctctcttaaagatgcggcacgcgaagaaatcgcctatgaaagagaaggcgatgtcatcagaatctttaacaaagaaacaaaagaaacgacgggctttaacatttttaacgtgtcttcttacttacagattgaggacaacggccccgtcgctttgtctgagacattcgttcaggatgtgaatgaaatactgaacagaaacggcgtttcagaaacgctgacggttgacctttctccgaaatttgttgtcggtcacgttgaatcgaaagaaaaacatccgaatgcggataaactgaatatctgccaagtgaatgtgggagaggaaaccctccaaatcgtttgcggcgcgccgaacgtggacaaagggcaaaaagtcgtcgtcgctaaagtcggcgcggtgatgccgagcggacttgtgattaaagacgctgaattaagaggcgttccgtcaagcggcatgatctgctccgcgaaagaactcgctttgccggatgcgccggcggaaaaagggattcttgttcttgaagacagccgcgaggccggcgaagcatttcaattctaactcccataaataagcgcacagaatcgaatgatgtgagagaaagccgttaagcaggcctgcttaacggctttcttcagttgggagcttaatcttttctgagccgcccggcaatggtatactaaatatcgtcccagactactaaaaagggagttagagagtgattaaacatgagttggctgaataaattttttgacttatttttaggtgaaaaagaagaagagcatgaacgtgaaccaaacacgcatgcccaaatcccgaaacagcagataccggatcagccagaaggcaaattcacgcgcatggaagatcctaaaatatattacgaatatccgaaagggaatttccgcttccccgtcgttccggacggctataagcgaacagagcaaaaccaaagacagcgggaaaggcacgaacgccgccagccgtcccgggattatgccgccgggaaggagcaaaccgagcggaaacagcatacacataaagagcctgaaacggtgaaaaagccctttaaaccgtcatccattccttcaccggtttacggctttcaatctcagcacagcataaaaaaagcgcctaattccgaaaagcggcgtgaagagaacgtaacattgctttcagaggagcaatttgttccgccaaaagccggccaggaaacagaaaaagagcccgtcttcacaacatccggcataacaaaacagacgaatgaccggccagaaccgtttgcgaaacaagagacggaagaaatcccggccgttaaaaaagaggagcttcacaccgaggctgagaatgtaaaagagcaagtgtttgcagcagcagaaccgcagcagactgaagagcgggagcacacggaaagcgcggagtctgccggctttacagaagaacaagagcatgaacaaacccgcccgcagcctattaaagagcctgagtatgaagtatcccgaacggctgaaaacacagaggaacaagcggcgccgcaggaggaatatcaggagcctgagccggaaaaagcaccgccttttgaaaccgcggaagaaacggtgtatacatacacagaacccggatacgatgaggaagttcagccgcagtctgaagacaagcccgaatcagctgaaaccgacgcggaacaggaagcagactctcagcctgagtacaatgaagtcacgcggcattcagaccccgagcctgaacctgcaagcatcgagccggccgatgccccgtcccggcctgccgaagaaaaaacggagcatcaaggacagcctcagactgtgaaaaaagcggagcggccgaaagagcgcaatgtaccgtttaacgtcatgatgcttaaaagcgataaacacaagcaggcgaagacgccagagggcggagcgagctatgtctttccgaatctgtcgcttctggacgtaccgccggcgcaaagacatgacgaccaatcgtggattgaagaacagcgcgagcttttaaacgttacactgaaaaactttaatgtgcgcgcccaagtcgttcatgtcacacaaggcccgtccgtcacacgttttgaagtgcatcctgagcccggagtgaaagtaaacaaaattacaaacttagcagatgatattaaactgagcctgtctgccaaggatattcggattgaggcgccgatccccggtaaaaacacgatcggcattgaagttccgaaccgcgtaagcaaagtcgttgatttaaggcagatgatcagaagcgccgctttcaggacgaatccgtctccgcttacagccgcgctcggtgtcgatatttccggaaacccggtcgtcattgatttgaaaaagatgccgcacgggttgatagcgggtgcgacaggatcgggaaaaagcgtctgcatcaataccattttggtcagtctgctttataaggcggatccgagtgatgtcaaaatgcttctgatcgatccgaaaatggtcgagcttgcgccttataaccaaattccgcatttggtcagtcccgtcatcacggacgcaaaagccgcgaccgccgcgttaaaatgggttgtggaagagatggaacggcgatatgaactgtttgcccattcgggtgtgagagatatcggccgctttaatgaattaaccgccgatcataagacaggcgaaaagcttccgtacctcgtagtggtcattgatgagcttgccgatttaatgatggtcgcgccgaacgatgtggaagaaagcattgccagaatcgcgcagaaagcgagagcctgcggcattcatctgcttgtcgcgacacagcgtccgtctgtcgatgtcattaccggaatgatcaaggcaaacataccgacgaggattgcattctccgtctcaagccaggtagattccagaacgatcatcgacatggcgggagcggaaaagctgctcggaaaaggcgacatgctgtactgggaaaacggtaccggaaaaccggtgcgcctgcagggcaactttgtatccgacagagaaattgaccgcgtcgtctctcatgtcagaaagcagctgccgccttcttatttgtttgaacaggaagaactgatcaggcagggaaccgcccttaaggaagaagacgaactgtttcctgaggcgtgccaattcgtcgtggagcaaaacagtgccagcacctcaagccttcaaagaaggttcagaatcggttataaccgcgccgcgaggctgattgacatgatggaagccgaaggcatgatctcagaagcgaagggcagcaaaccccgtgaagtgctgattacggccgctgacattgctcaagaataagaatatcgttcatttttctcacaaacatggtatgatagtggatggaccatcaaaactgcatcactgtcacgcgctgaaatatcatgcggcaggtttaatcaaaaagaaagttacagatactgacgataacgtaaaaataaatggaagcgccgctgtgcgggcttttcgcccgcggcggtcgcaaaatgaaatgagcgtcatatactggggaacagatagacgtttgttggaggtacgattatgactgtttatcattttgttggaataaaagggacaggtatgagcccgcttgctcaaatcctgcatgatacagggtatcaggtgcagggatcggatatcgagaagcagattttcactcaggctgcccttgaaaaaagaaatatcccgatctatccgttcagcgccgataacatcaaacccggcttaacggtaatcgccggaaacgcattccctgattctcatccggaaatcgcaaaggcgctcgctgaagggattcctgtcatcagatatcataaatttttagctgaatatatgaaaaaatacacaagtgtcgcggtaacgggcgcacacggcaagacgtccacaacgggcctcttggcacacgtgatgcagcaggcgaagccgacttcgtttcttatcggggacggaacgggcagaggaaatgaaagcagcgaatactttgtatttgaagcctgcgagtaccgccgtcatttcttaagctatcagcctgattatgcgattatgacgaatattgattttgaccaccctgattatttcgccaacattgacgatgtgtttgatgctttccaaaacatggcgcttcaagtcaacaaaggcatcattgcctgcggtgatgacgagtacctgccgaaaattcacgccaatgtgcctgtcgtttattacggcacgggagaagaaaatgattttcaagcgagaaacatcgtgaaaaatacggaaggcacgacatttgacgtctttgtccgcaatacgttttacgatacgttctacatcccggcatacgggcatcacaatgtcctcaattccttagcggttattgcgctctgccactatgaagagatagacgtgaacatgattaagcgcggacttgaatcattcggcggcgtcaaacgcagattcaatgaaaaagtgatcggcagccaggtactgatcgacgactacgcccaccatccgactgaaatcaaagtcacgattgaggcggcgcgccaaaaatatcccgaacgtgaaattatcgcggtatttcagccgcatacgtttacacggacgcaatcattcctggatgaattcgcagaaagtttaagcgcggccgatcgcgtgtatctgtgtgacattttcggctctgcccgcgagaacgtcggcaagctcacgatcacggatcttcaggaaaaaatcgctaacgcagaactcattgaagaaaatgacacatccgtgttaaaagcgcatgaaggcgcagtgctgatcttcatgggcgccggagacattcaaaaatatatgagagcctatgaaaacgtcatagcgtaacgaaaaagcagtggggctctcactgcttttttgcgcgtgctgcaaagggatttaccgagaaacggagaaatagtatacatacagatctttcatatatgtttatcattttaagaattgggtatataccactatatcctgcattaaggaggtattagatgatcatcattctttacttaagcgtcgcactcattgccgttgcatttctcatcctcgtcatctatctgtccaaaacattaaagtccgtgcagatgactttaacaaacgttgcctcgactttagacggccttgaagggcagatgaaaggcattaccgcagagacaaccgagctgttacataagacaaaccgtctcgcggaagacattcaggaaaaatcagagaaattaaatacggttgtccatgctgtccaggaagtgggaacttccgtccagcagtttaatacatccataaagcaggcagcaggttccgttacggcctctgtaagagagaatcaggataagatcagtcaggttgtcacctggagccaggccgctatggaaatatgggacaagtggaagcaaaagaaaaaaacatcgctttaatcataagaaaaatccactaaggaggaatcataatgagcaaagatggaatcaatagtaaggattttttaatcggaacgctgatcgggggaattatcggcgcgacaacggcgttgtttctggcgcctaaatcaggtaaggagctgcgcgacgatctcggcagtcaggcttctgcgttaaaggataagacggacagaatgacggccgacgcgaaagaaaaaggctctcaatatgtcagcatcgccaaagacaaaacatctaatatcacccagctggtagctgatcagtcaggccagattatgaataaagtgaaggatttaaaagaccgttctaagagcacactaaccgagaaagccgaagagacgagaagcgaaatgcaggacacggcccaaagcatcaaggccgaagcggaagacgccggggaaaaagccggtcaggcaaatcgctgatcttcaataaggagagataaccgacatgacaaaacagctgatatcgtctgaagaagagttcaaaaatgccgttgagaaagaaaacaagctggtgtttttgaaacacagcacaacctgcccgatcagccaagccgcgtttcaggagtttgacgcctttgcatcggcgcattcggaagtgccttcttattacctgcaggtgcaggacagccggccgctttcaaactatatcgccgagacatacggcgtgaaacatgaaagcccgcaagtattcgtcattgcaaacggcgaagtgaaatggcacgcgtctcattcacaaatcacaaaaaacgcaatagagcagcacctttcataattgctggccgccggttgataccggcggttttttttttgaaaaaaactattgatcatttcagccggatcatgtaggatatcaatatataccgcttcaacgcataaaagcttaaaagcgttttggtgataaagccgaatgtgaaaaaatttattatttcatattcctattttcgcataactgtagtaagatgcatgttaaccattaaaataaaacatagcatagaagggatgaaaaagatgagcaacaaggaattagagagcctaagacagcaggcagacgcactaaacttagaaatccttaaattaatcaatgaacgcggagccgttgtaaaagaaatcggtaaagcaaaggaagcacagggtgtcaaccgatttgaccctgtcagagagcgtacaatgcttaaccgcataattgaaagcaatgacggcccatttgaaaactcaacgatccagcatattttcaaagaaattttcaaagccggacttgaacttcaagaagaggatcacagcaaagcgttgctcgtctcccggaagaaaaaagcagaagatacgatcgttgacattaaaggtgaaaaaatcggtgacggcgatcagagattcatcgtcggaccttgtgccgtagaaagctatgagcaggttgccgaagtagcggccgcagcgaaaaaacaaggcattaaaatcctgcgcgggggtgcgtttaaaccccgcacaagtccgtatgatttccaaggtctcggcgtagaaggcctgcaaattcttaaacgcgtcgctgatgaatatgacctcgcggtgatcagtgaaatcgtaacgcccgcacacattgagcaagcgattgattacattgacgtcattcagatcggcgcgcggaacatgcaaaactttgaattgctgaaagccgccggttccgttaaaaagccggtattgttaaaacgcggtcttgccgcaacaatttcagagttcatcaatgcagctgaatacatcatgtcacaaggaaacgaccaaatcattctttgtgagcgcggtatcagaacgtacgaaacggcaacgagaaacacactcgacatttctgccgtgccgattttgaaacaggaaactcacttgccggtgtttgttgacgtcacacattcaacaggccgccgcgatctcctgcttccgacagcaaaagcggcgcttgcgatcggcgctgacggcgtgatggccgaagttcaccctgatccttccgttgccctttcagactctgcgcagcagatggatatacctgaattcgagaaatggctgaacgaattaaagccaatgctgaaagtaaaagcataatacaacgttccgctctttaaaggccgcctcgcgcggctttttttcgtatcttcattttatttaattataaaatgaaagtgaacgttttcatcactgggaaaaacgtgtataatttcatgagagatatttaaatttgatgaataatgaaaaataatgtacactactgacttacgcttacaatcataaacgacagaatgcgaaatcgtacgacatttctttacataaagtgtttatgctatagataaggataagtgtatccagtaaaaggagtggtttcagtgagcaacattacgatatacgatgtggccagagaagcaaatgtcagtatggcgactgtttcccgcgtcgtgaacggcaacccgaatgtaaaaccgacgaccagaaaaaaagtattggaagccattgaccggctcggctatcgcccgaatgcggtggcaagagggcttgcaagcaaaaaaacgactacggtcggcgtcatcatccctgatatctcaagcattttctactctgaacttgcgcgtggaattgaagatatcgcgacgatgtacaaatataatattattttaagcaactcggaccaaaatcttgagaaagaactgcatctgttaaatacgatgcttggcaaacaagtggacggtatcgtatttatgggcggcaacattacggacgagcatgtcgaagaatttaagcgctctcctgtgccgatcgtcttggcggcatcagtggaagaacagggcgagacgccttctgtcgccattgattacgaacaggcgatttatgatgccgttaagcttttcattgataaagggcatcgcgatattgcactcgtctccggaccgatgcaagagccgatcaaccgttcgaaaaaactgcaagggtacaaacgggcgcttgaagaagcggcgattccgtttaacgagcaattcgtagcggaaggcgattacacttatgattccggtatggaggcgcttcaaagcttgatgggccttgaccggaaaccgacggcgattctttctgcgacggatgaaatggccctcggcattatccatgcggcccaagatcaaggtctttcgatacctgatgatcttgatattatcggttttgacaatacgagattgagcctgatggtccgccctcagctttcaacagtcgtgcagcctacgtacgatatcggcgccgtggcgatgagacttttgacaaaactgatgaacaaagagccggttgaagagcatatcgtcgaattgcctcaccgcatcgaattaagacaatcaaccaagtcataaaaaaacggaaaagcaagcttcactctgaggggtggaatcttgcttttttacttgagtaaggagaagatatgaaacgttttgattatctgacgcccgttggctttatgttaggctgtattattgtcgcaatcggtattctgtcagggacgggactggcgggaatcagttcatttttagatctgacttcttttttaatcgtcacaggcggccttgctgcggcgatctttatcagctttccgccgagggatttaaagaaaaccccttctgttctgaaacaggtattctcccgtcaggatgacaatgtgaaagagcttgtcagagtatttgtcagcctttcggagcaggcacgcaggcaggggcttctgtctctggatgaccaggcgcgtgagatcaaggatccgtttttaaaaaaagggcttttgcttgcgattgacggctgggacgaggaaacgatccggctggtaatggattctgagatcgccgcgatggaagaaagacacagaaaaggaagacgcgtttttgaaaaagccggtgatttcgcacccgcctggggaatgatcgggacgctcgtcggactcgttctcatgctcaaaaacttaaatgacccgcataccctcggaccgaacatggccgttgcgctattgacgacgctgtacggagcgctgcttgccaacttggtgtttatcccaatcgcggcaaagcttgaagaaaaaacggaaagtgaaattttcatcaaacaggtcatgatcgaaggggttgtcggcatccaatcgggcaaaaatccccgcaacctcgaaagtcagctcgttgtcttcagctcaagagaagactggcgtaaaggacagcctgcgaacaagaaaaagggcgctgtccatgaagcttagaaaagagcgttttgaaagaagaaacaaaccggaacattccggcggttcaccgagatggatggtgacgttcgctgacttgatcacgctcattctcgtgttctttatattgcttttttcgatgtcgcaaatagacgcggaaaaatttcaatctgccgtttcatcgattcatacaaacggcagcgggggtgaaccggcgtcatcagacaaagcaaatgaaaataaagaacaggatttgctcctgaaaaacgtgaagacatacataaaagcgcatcatttgagttcgaaattgacggcgaagcgcgatgagcgcggagtggttctggtgctgcaggaggccgttctgtttcagacaggaaaagcggatgtgctgaaaaacgccgagccggttctgcatcagatcgcggtgcttttaaaaacaattccgaatgacatacaggtagaaggccatacggacagccgccggatttccacctatcaatttccgtcaaattgggagctgtcgtctgcaagagcggcgagtgtgatccggtattttaccgcgaatgaagacttttccgccaaacggtttatctctgccgggtatgcggatacgaaacctgtgaaggacaacaaaagtcccggacatatgaaagaaaaccgccgtgtagaaattgtgatcaaaaaaacgacctcctcataaggtcgttttttattttgttttataccgctgctcagaccggatggcaaaaagtgctttttccacggtttgggcatttttttctgaaatttcttctttgcggggaatcggaggatataattgttcaggatcactccaaaaagcgggcaacgtgcagggggagtgcttctgccatttatcaatccatttctgcggtatgcgttccccgggatcaatccctttcatctcaagccaaatgcggctccatgctctcgggacgactctccaaatatcgtatccgccgccgccgaccgcgatccatctgccgctgcaatattgatgggctaatgaatgagcaagccgcgggatctcctgataaatggagattgtattggacaggtgtgtcaatgggtcgtaataatgggcgtccgcaccgttttgggtaagaatcacatccggcttgaaaaaagccgcgatttctgaggcggccgtattgtaagcgtgaagaaaggaatcatcctctgtgaaagcgtccagcggaatgttaaaagaatagccgtagccttgcccgcttcctttttccagtacctgtcccgtcccgggaaataaataacgcccggtctcgtgaaaagaaacagtgcagacatcagacctgtcgtaaaacgtaaattgaacgccgtcgccgtgatgggcgtctgtatcaatgtataacacttttgccccgtagttcttctgaatgtattggatggccacggcgctgtcattatagatacaaaagcctgaggccctgccgcggaagccgtggtgaaggccgcctcctaaattgcaggcgtgcctggcttgtcccgtcatgacataatcagccgccgttaaggtgccgcccaccagaagtgacgcggcttcatgcatgccggcaaaaacgggggtgtcttccgttccgagaccgtagctttctccttctgcggcagggagccggcctgcacccgctagttccaccgcctgtatataatcctccgtatgaacgagagccagctcttctttagcggccgtgcgcggtgtgacgatatctccttcgtcaaacgcatccgccgcctgaagcagatcgtatgttaaaagcacacgacgctgattgaacggatgttcctgatgaaattgatacgtctgataagaaggcgagtaaacaaaaacgctgtctctcatggctgatccctcaaatgtttcggccataagacattgtatccggcttcttgaacggcacggataaaagggagcggattcatcgtcttcacccggaagacgagaatgttcgacccggcggaatcatggggatagacgagcacactcaggatttgcagctgaagatcgcggcacatgcagctgagatcagcaaggctttttgtcatatccgtcaccaggatttccacctgtgatcccggctgggccgcgcctgtcaggctgacgaaagtccggagcacgtcggttttcgttaaaatgcccgtcagcttatggtttaccgtaatcggcagacagccgatgccgtgctcataaaaggaagcggatatttcttccacaaagtcaagcggatgggcgcagatgacattccgcttcataatggtctccactttgtttgtcagaaatgcgccgcgttccttttgttcaaagctgccggggccggcctgtttaatgtctctgtctgtgacaataccgatgacgtgcagctcgtcgtcgatgacagggagatggcggatatgatatgtcttcattttacggacggctgtttcaatggagtcgtgttttgagacggtgatgacgtcccgtttcatgatttgttctgcaatcatctttttatcccctttgtatgtcagtcaatacataaatcgctgataaaaacgaagcctgtcgaactgttcaattgactcctgactgacgtgcctgccgatgcgggccatcagacaattggccggatgagaactgatttccggttcatccgttgcgaaccagacaagacccccggcattcatcatcttttccatgatctttctgtattcccacacatcttttttcattccttttaaatcccaatgccagtaatattccgtcgtcatgatgatgtaccgttccatctgttcatccatcatgctgactgtcagcaaagtttttccgacagaacagcccctgtagccgggagcgacctcgatcgccccgagttcaaggaggtcttccatatttccgtcagaccatcgttcaagcggatcaggatataaatacgtcacatagccgataatcgtctgtccgtccctggcaataatgatccgaccttcaggaagcccggcgatctcgattaacgctttgtgctgttcatgaggaaggcgaaaggctgtcaggccttcatgaaactcatactgtgctaggtcctctggaggaacgggcccttctactaaaagagggccggctgctgtctgaattgatgaagaatggtacgttttatgatgtttcactgattcaccgcctgtcggttcttaataaaaacacatctcttttaagcataacaaaatataaagcgttttcaatagtgttgtaatttatattttaaaaattgagaaaactgtgaacatctactataattagtctatagataagcaaagggggatgttgcatgaatttgaaagcgctgccggcggaaaaggggaattatcatctgcgaaattatgaggaaacgtaccgcagcttcgattggaaagaggtcgaagcggcattttcctggcatcagacggggaagctgaatgcggcgtacgaagcgattgaccgtcatgccgaatcatttcgaaaaaacaaagtagcgctgtattacaaggacgcaaatcgggatgaaaaatacacatttaaagaaatgatggaggaatcgaaccgggcgggaaatgtactgagacggtatggaaacgtggaaaaaggggaccgcgtttttattttcatgccgcgttcgccggagctttactttatcatgctcggcgcaattaaaatcggtgcgatcgccggtcctttatttgaagcgtttatggaaggcgccgtcaaagaccgcctcttgaacagccaggcaaaggttgtcgtgacaacacctgaactggccgaacggattccggcggacagcctgcccgacctcgagcatattttcattgtcggcggcagcaaaggagcgggagataaaatcattcattatgataaagcggctgagggagaaagcacgagacttgatattgaatggatggacagaagagacggctacctgcttcactacacatcaggatctaccggaacgcccaaaggtgtgctccacgttcatgaagccatgattcagcaataccagaccggcaagtgggtgcttgatcttaaagaagacgatatttactggtgcactgcggacccgggctgggtgaccgggacggtgtacgggatatttgcgccgtggctgaacggagcggcgaatgtgatcgtcggcggcaggttcagtccggaaaactggtacggcacgatcgagaagctcggtgtcagcgtctggtacagcgctccgacggctttcagaatgcttatgggcgccggagatgaaatggcatccaaatttgaccttacttcacttcgtcacgtcctgagtgtcggagaacctttgaaccccgaggtcatcaagtggggacataaagtattcggcaagcgcatccacgacacgtggtggatgacagaaacgggcggacagctcatttgcaattatccttgcatggagatcaagccgggttcaatggggaaaccgattccgggagtggaagcggcgatcgttgacaatcagggaaatgagcttccgccgtaccgaatggggaatctcgccattaaaaagggctggccgtcgatgatggattccatttggaacaacaaagagaaatatgattcttatttcatgccgggcggctggtatgtttccggagattctgcttatatggatgaagacggttatttctggttccaaggcagagtcgatgatgtcatcatgacatccggcgagcgcgtcggcccgtttgaagtcgaaagcaaacttgttgaacatccggcgattgccgaagcaggcgtcatcggaaagccggaccctgtccggggagaaattattaaagcgtttatcgcgctcagagaagggcatgagccatccgatcagctgaaggaggacattcgcctctttgtaaaacaggggcttgccgcgcatgccgcaccgcgggaaattgaattcaaagataaacttccgaaaacacggagcggaaaaatcatgagacgtgtgctgaaggcgtgggagctgaacctgccggcaggcgacctgtccacaatggaagattaaagacggcgttgacatcgtatcttatttatgttaaaaatgagtaagcttcatacgaaaaggttttgattgagacaagtagggtatctgattgttcaagagagctgatggccggtgaaaatcagcacataagatatgccgaatacactcatgaaccgtttttgcgaacaaagccattccaaggctttcagtagtgaaagaacggacacggtccgttatcaaaaagagtgataaaagcttttttatgcttttattagtagggtggtaccgcgattatatcgtcccttcgttttaaacgaaggggcgttttttattttcataaacaaaggagcagacaaaatgactaacttattagaggatttatcattccgcggcttaatccagcaaatgacggatgaagaaggactgaataaacagctgaacgaggaaaaaatccgtttatactcagggtttgacccgacggctgacagcctgcacatcggacaccttctgccgatattgacactgcgccggttccagcttgcaggccaccatccgattgcgcttgtaggcggtgcgacgggactgatcggcgatccgagcggcaaaaaagcggaacgtacgttaaatactcaggatatcgttgtcgaatggtcgcaaaaaattaaaaatcagctttcccgatttttagatttcgaggccggagaaaaccccgctgtcatagcgaacaactttgactggatcggaaagctgagcattattgaatttctccgtgacgtcggaaagaacttcggaattaactacatgcttgcgaaagatactgtaagctcaagaattgaaaccggaatttcttacacggaattcagctacatgatcctgcaatcctacgattttctgaatctgtacagagaaaagaactgcaaactccaaatcggaggcagtgaccagtggggcaacatcacggccggtcttgaactgatcagaaaatcagaagaagaaggagcgaaagctttcggtcttaccattccgctcgtcacaaaagctgacggcacgaaattcggcaaaacggaaggcggcgccatttggcttgataaagaaaaaacatcgccgtacgaattctaccagttctggatcaatacagatgaccgcgacgtcgtcaaatacttaaaatactttactttcttatcaaaagaggaaattgaagcttatgctgaaaaaacggagacggctcctgagaaaagagaagcgcagaaacgtctcgctgaagaggtgactgttcttgtacacggccgcgaagcgcttgagcaggccgttcatatctcccaggcgctgttcagcggcaatattaaagagctttccgctcaagacgtcaaggtaggatttaaagatgtaccttcgtttgaaaaagaccgctctgaagaactgtctttagtagacgtgcttgtggaatctaaattgtcgccttcaaaacggcaggcccgcgaagacattcaaaacggagctgtttacattaacggcgagcgccagacggacatcgggcatcttctgactgcggaagaccgcattgaagatcaatttaccgtactgcgccgcggaaagaaaaaatacttcctgatcacgtactgaaaataaaaagcagtccggccgctcaatgcggcaggctgcttttttatgttttgtgaatactgcacggggaaatgagtacagtacatagtataagcaaaacagggaaggggtgctgcgccgtgaatttcatgtttaccatcgcaaaagaaagattgcagcgggatcattgggaacagcagcaaagcataaacgccgaagccaaagccgaggaatcagagacggaagaagaaaatccgacatcataaaggtaaagcctccattctgcggaatggaggcttttgattgtcaccatatcagcctggcggcggccatcagcacgactcccgtgatgaccgtgatggataagctttttgtcagcatcgcgcaaagcaatgtcgggatgagaacgatcattgctttccaatcaaaggtcaaagcactgtttgttttcacaatcatgctttccgttaccagagccgtcaaaatgcaaagcggaataaaggagagccattttaaagccaactcaggcatctgaatgttccggacaaatataaacggaacaatgcgcggcacaagtgtaacaatcatgcagccgagtataatccagatcatttgtgtgctgatgctcatttgtccgtcaccaccccgatcgttgccacaatcacggttgagacgatgaccgcgatgtgtgacgggacgaaatacgataacaagaccataaaaatgatcatatagagaattaaggagaggctgtgcttcagcttttccgaagcggacgattgcaattgcagcacaagcagcgccgcaaacatagcgggcaaagcaaagtccaggccgagcgcgtaaggatcagatatccattgtccgagaagcccgcccattacacaggaaataacccagcacatgtaagcggttatattgaggccgttcatccatttatcgtataacctgccgttctgagccgctttgttcaccgctaccccgaaagattcatcagtaagcaaagccccgaagccgatatttttcagcaaagagtatttcgtgaaatacggcgcgatggtcaggctcagcagaaggtgccgcagattgacgataaacgtcgttaaaataatggcggaaatcgggctcccggaaacaaggagcgagcaaataataaattgggcggcgccggcatagacacacaaagataacaaacaaatttcaagaatgcttagatgagaggcaacgccaacgatgccgaaagcaaaaccgatgctcatatagcccagcagcgtaggcacacaatcccgcaccccctgtaaaaacgtatcgttcatttcccgggaaacggcggttttttgcacttctgtgttaatcatttttcatactcctttcatagagattataatgataacgactaatgaaaaaatcaaagaaaatacggttcacatttatatgaaccgatttccggtgacgacatgaaataacgaatggttttgtttcatcaggccttcaactttctcagccccgacttctttcacaagctccgcgaacatcagatcgtgcctcatatattccatggccacgagaacgagagcgggatcttcggatttaatggcccaggcattcgtctgcggagaaaaattggcgattaagacttctttattatcgcgggcagctatcgttaatcttccgcccatccgtttctccgccacttcaggagacatattatgatttgtcgtatttccgagcttcacttccggagggccgaacacaatcgaaaagacgggcaattgttcggcggcgcgtttgttagcggcttcttgaataaagggaatctgctgttcccagacagacagccacaactcttcctcggctttttcaatcatatccttcatctcattgatgacatgatcattcgtgctgatgcggcggatgacattcatttcctgctcgctttccagcgccaataacttttcctcaaggtagccgaatgagttctcgaaatcatgccggagccggtcgattaattcctttccggcaagcggagcatatgtaaccggatcagacggcacaatatggacagcgcctttatcaactaatttccccaatacctcatagatcattgagcgggggacgcctgaccttttgctgatttcatatccggtaacaggcgagtgtttcaacaagccgatatatgctttacattcatattgagaaaatccaaatttctgtaattctttcagaacatcctccataaacatcctccgtagtggttattcatgaaactactataatgtaagcggttatatcttgtcaatgggacttgagtgctgaaagaaaggtgtgcctgtttttgtcgctttccaacttagtttatggtgagttacatgtatggcttttgtgaaaaacgttgccgtagacccacacgaatgccgtttgatacgataaattcaagaagttaaaaagaggaggatcacggtggaaaacacctctaaaatcgcttttttatcggttataagcaattccctggtcgtcatgctcaaaatagtggtggggatcataaccggatctgtcgcgatactttctgaagccattcattcttttttagatttgatcgccgccttcatcgcctttatctccgtcaggatttcaaaaaagccggctgatacagggcatccgtacggtcatggaaaagtcgagaatctgtcggggactatcgagacgattctgatttttgcggcagggatttggatgatatatgaatgcgttcaaaaactggtcaacccggcgccggttcatctgcctgtattgggaattgttgtgatgcttgcgggggctctcattaatttgatcgtttcgaagttcgtaaaaagagaagccgaaaaggttaattccgtggcaatgaaatcaaatgccctgcatttactgactgacgtgtacacatcattaggcgtagcggcaagccttttggtcgttaccgtaacggagtggtacatacttgatcccattataggtatggtgctggcggtgtatatcatatatgaagcgtttaagttaatgaaagaagcattcccgccgctgattgatacccgtttgtcggaagaggaagaaaaaacaattttaaagattattgaaacatttcaacaggaatttattgaaattcacgattttcgtacaagacgctccggcccgcaggagtatattgattttcacctggtcgtagcctctcacgtgacgattaaagacgtgcatgacctgtgtgaccgcattgaaagagatattacgaatgaattcaaacaagcacaggtaatgattcaccccgagccggagagcgagaggaagaaataaatcgatcttaagtttgcgtttgttcccggcaaaatgcctgcaaaaggcccgttcccacgggtctttttgttgtataaatgactatttctcgctcatatgagagataagcttatacacgtgaggggttcatttcatacgttatgttgtaaagaaaaagggaggtgaacagaattgaacgctatttctgttaaagaaattgaacatggagttgccgttgcggaaagagaaggtttaggggagtatttataccaagaaccggtttctaaaaaatgttcgcgccgttcccgcagcagaaaacggacacaccgttctcgcagcagaagacggacgcatcaccggacacaccgttcccgcagcagaagacggacgcatcaccggacacaccgttcccgcagcagaagacggacgcatcgccggacacaccgttcccgcagcagaagacggacgcatcgccggacacaccgttcccgcagcagacggtctcatcaaaaacgtagccgcaaacgctgttttaaatgctgactgcagactctattacaagtaacggagatctgctataatggcaagagaactgcataaaagatccggtatcatcatctgcggacactgaactgacaacatggcgctgtttgttcgtgtccgttttttatgtcaaaaaagatgccggaggataaaaaggaagggatgacgccgaatgaagctgaatgaggatttttataactctgaaggaaagacagtctctttgccaaacatcagcagcaagcttttgcatatcacggacagcgggcatatcagcgttgacttcatcagcataagcaggctgcggaaggcttcaaaaatcgcgatcttaggtgacagcgtcgcccgggggctgcgtgcggaatacggctttggtgacattctgaaagaccggacaaacgctgaaataaccaatctgtctgtcagcggcgttaatatgagcaacaacggaagcgataacatttatcagcaggcgcttaaaacaaagggacatgatgtcatcattgtccagggaacagatgatgattggtgcaaccacattcccatcggcacagatgaaaaggatatcaccacattttacggaggcttctgccaagtgatccagcagctgcggagcggaaataaaggcgcgagcatcattgtggtgaccccaacgagacaagccaaaatgtcaaaaggaaaaatcgtccgccgtgatactgataaaaataaactgggcctgaagctggctgactatgtgaaagcccaaaaagaagcctgcacactcctctctgtaccatatgccgatctgtttgatactgatctcatcgacccgtataatcccgctttccgcagcatgtgcatgtcagaaggtcttcatccgaacgagaaagggcatcaaatcatatttcaggaaatctgccggaattatttttactattatgggtaacacagcgctaacagattattttcggctttgcttttctaatagctcaattattctttgagatgcgtgtttttgcgctctcaaaagcgagacgatattaccggtaaaaccgattaaaataaaaagcagcaaaatgatcatccacatagcgaacctcccgtcgagtgttgaaaaacccactctttattttacttattatggatgggggagagaataggtctaactattggtgtttctttataaatccataaaaaaatgcacagactgaacgggtctgtgcttttttctcttatttcagcaggttcaatgattcacgattaaaggcttccaaatcgtcaggtgttctgcttgttacgatgttatggctcacgacgacttcttcatctttataatgtgcgccggcattgattaagtctttgcggatgctgcggaatcccgtgatatcttttcctttaagaaggtcggtatcaatcagcagctgcgggccgtggcagatcgcgaaaacgggtttctgattttccacgaatgctttagtgaattcacccgggcggtcatctccgcgcagaagatccggtgaaaagcctccgggaatcaataacgcatcgaattccttggcgtctgcgtctgagatcgcttgatcgatctttactttctcaccgtgcttgcccgtcacttctttccctgcttccaaatctattgtcactacactgtggcccgcttctttaaatgcttccgccgggcttgtatattcaatatcctcaaattgatctgtcatcagaactgcgatttttttgctcatacatcatgcctcctgtgaatttgtatatgacaagaatatcaggcggattcccgcctcacaacgtatttgcttatgaaaaaagacccctctggaaaagaggagccaaaaggtacggaggtctgctgaaacttacgtgtttaacctgagataaggcaagaaatcgaaccaattactttttgcgtctttttttctgctttttacacccgcatttccccggatcgcccggatcaatgacttcgtgaattgtttcttccttataaacgtggcggggaacataacggatatgctctctgttaatgtgtttgatgggatggacgtaaaccacttctttgtcagtatacttgtcagtcacaatatacttagggtcacagtaatacactttcgattttttacccattcatctcacctcccgtactttattaaatgctgacaaggagggttttgcatcggacaagtacaccatggcaagtccacaattttccagccgcaatttcgtttttctgatttttcctgaatccgcctcaaattggaacggctaaccctttttgagcggggaaatctataaaaaagaattcaaaaacgattattttctcaggtcaatcgagatgcatacatctttagggggatttttagaatgctcgatgaaaaaacgattgaaatcattaaaagcacagtgccggtcttagaagagcatggtgaagaaatcacaggccgattttatgacctgctgtttcagcatcaccctgagctgctgaatatctttaatcagacgaatcaaaagaaaaaaacacagcgtacggccttgtcgaatgctgtgattgcagccgcagccaatattgaccggctggaaaacatcgttcccgtcgtcaaacaaatcagccataaacaccggagtatcggtgttaaacccgagcattacccaatcgttggaaagtacttgttaatcgcgataaaggatgtgctaaaagacggggctgctcctgaggtcattcaggcatgggaaaaagcatacggcgtcattgcagacgcttttatcggaattgagaagcacatgtatgaacaagcggaaacgcaaaaaggcggctggaaagactatatggcgtttaaaattgataaaaaggtaaaagaaagcaaggagataacgtcgttttatttaaaaccggaagacggacaagttctccccgagttcaaagcgggacagtatatcagtgtaaaagtatacattccggacacgggttatacgcatatccgccagtacagtttgtcggatgtatccggtaaggattattacaggatttccgtgaaaaaagacggaattgtttcttcatatctgcatgaccaattacacgaaaaggattcaattgagatcagcgctccggccggggatttcgtattagaccctgattccaaaaagaatctggttctcatcagtgccggtatcggaattacccctatgatcagtatgttaaagacggttgccaaaacccagccgcagcgaaacgttctctttatccatgcggcaaggagcggagagtatcatgcgttgcggcatgaagctgaagaagccgcggaacactcatccgttgacaccctctttatttacagcgagccgtccgaacaagaccgttcagaaaacattcgttttcgggaaggccggattgacaaacagctgttagaagaagtgatgacagataaagatgctgatttttacctgtgcggatcaccgtcgttcattaaagaaatgaaaaagctgatttctgaattcaatacaccgccggaatccattcactatgaattatttgaaccgcagctgagtatggtgtgacgcagcaaaatcataacaagaaaagacagtctgtttaacagactgtctttatatgtttaaacgtccttctcattccagtctatagtattttcaagcaggtaaatcatattcaacgtcgtagtatcataaaaagacaaagctttttatgtcccaacatacttcggtagccggctggaatggttcacttcctgatacttcaactggagcattggctcctgctcttgcgaataaaatagcatcgctctaatagtaagaggtggctcaatggcagtttttgttgaaaaaacgctccaaggtctaaaagaattaattgatgaaaaaggccgcttaaaaattttagggagtgaaggaacgcttttagaaacagaatgtactttctttaaaggtgcaacagatctggagattgagagttttgagaagaaaataaaagtctcacttcctgaagattataaaacctttttaaaattgcataacggagccagaatatttgatttgttgatttacggtgagaatgtgggtgggggtttgcatattcttaatgtagaagagattgaagagtatatgcaaaatggttttttagagcctcagtttattcctgtcgcacatctgttagacggatgttatttgttaattgacaaaaccaaaatgtccacagatccaaactatttatggttccgcggatttattgagtatgaaccaatgcaacttaattttgagatatttttagataggtatatcatgtctcaaggagcaaatttttgggagtggaatatctatactgctgaaaattattataggactcaccagggtgatgaggattaacctttcctacagttgggttggttcatttttgcggttagacttcgatttgaacttttaaaaataggtttaatttgggagacgaaccgattaattggtgtatagaggatttataaaaagcgcagatactctgcgcttttttatttaagtatttttcgaatcattcgcagcccgtttttggaagaaggataacggaaagcgaagtcgaagcggttcgtttgtttgacgacgctttttttgtgcgtaaacgtgttaaagctgtcaaatccgtgatagctcccgatgccgctttccccgacgccgccgaatggcaaatacggcgtcgcaacgtgcattaacgtatcattgatgcagcctccgccaaacgacagattctctaaaacagcgcgctcagtttctttgtttgttgtgaagagatacagagcgagcggctttgggcgcgattggactttctcaatgacttccccgatatcacggtatgtaaagagcggaagaattggcccgaaaatctcctcctgcatcactggagagtcatccctcacttgttcgagaatggtcggcgcaattttatgatgagcgggatcagattgtccgcctgtgagcgggacgccatcattcagaaagctgagcagccgctgatagtggcgttcactgacgattttgccgtactgcggattttgttcaggctgagggccgtaaaattcactgatcgcacgcttcatttcttctgtgagcttcgttttgatatcttggtggacaaataaataatccggtgcgatgcaggtttgccctgcatttgtaaatttcccgaagacgatgcgtttggcggcaagctgtatatcagcatccttatggacaatgcagggacttttgccgccgagctccaaggtaacgggaattaattgtttggcggcggcctccatgacgatttttcccacggcaacgcttcctgtgaagaaaatatagtcaaagggctgctgtaataacacagtgctgacgtcgggcccaccctccgccatagcgacatagtcactcggaaaaacgctgctgatgagtttggaaagaacagcggaaaccgccggcgtatattctgacggtttgagaacgaccgtgtttccggccgcaatggctccaatcaacggagaaagcgccagctgcaagggatagttccaaggcgcaatcaccaaaacggttccatatggctcagggataatgatgcttttcgagcctaggtgagtcagaggcgttttgactcgtttcggtttgatccattttcccagccgcttcatcacaaaactgatttcctccagtacaattccgatttctgtcgtgtacgactcctgttcggatttgtggagatcctgatagagagcggctgttatatcggcttcttgtgttttgacggcttgtttcagcttttgcagcatgttcagtctcgattctagctgtctcgtatgccccgccgcaaaataggctttgtgcttgctgacgatagaggggatgctgttcattcagtcgctccttttttgtaaggtatgatgattcattatgtaaaaaatcgcttctgcttgtcaaatgggtttttctaatgtacatgtagctgaaaagccagttggtacataaaaaaagccccggacaggggctttttttaataaagagagggagcttctgtccattattctgacagcccaaaagaaaaaccccggacacattgtcatcacaacatgtccggggtttaatccaatgctctttaaagagcgtttacttaacgggagtagaactcaacgataagcgcttcgttaatttccggagcaagctcagagcgctctggaagacgagtgaatgtaccttcaagcttttcagcgtcgaaagtaaggtactcaggaacgaagttgtttacttctacagattctttgatgatagaaaggtttcttgatttttcgcgaacaccgattgtttgaccaggttttacttggtaagacggaatgtcaacgcggcttccgtcaacaaggatgtgaccgtggttaactaattggcgtgcttgacggcgagtgcgcgcaagaccgagcttgtacacaacgttatcaagacgtgcatctaaaagaatcatgaagttttcgccgtgtttaccagtcatttttgcagctttgtcaaacaatgtgcggaattgacgttcgtttacaccgtacatgtgacgaagtttttgcttttcttgcaattgcaaaccgtattctgatagttttttacgctgtcccggaccgtgggggcctggtgcgtaagggcgtttttctaattctttacctgtaccgctaagagagattcctaaacggcgagacagtttccaagatggacctgtatagcgagccataatgtgactcctcctttggttttattttgtggaaaataaaaaccgtctgttcgatccgaccgtgcacattttgttttcatgtatcctcgctccagcagcagagagttacacgatacaccttacagctaaggaacaaaatgcaaacacagaagctgaacaaaaaggctgcaatatttcacacaaagaacattatatgatttttctccgccgccgtcaaccatttctccatgaagagtgccggtttatgatataatgtacaaaaatgagtagtacatgtttaggtgataaaaatgaaaaaacaaacaattgatgaagtgacggcctttcatcagaaaatgctttcttttttcttaacgaaatctgaatccgtctcattatccgactcgctgttatggctggcctcagctctagaatcctgctttacatctctttcattgaccctttcaccggcagaatcaacacgtttcaccataaaaacagaagatgaaccgcattatgctccgctgaaagagagtgacggccgttttatgatcaggaatcagacgtccggcagatccttttatctgcgctcggaaggcgggctgccgatcccggaatcattgcctgagatcgttactcagtttattaatcaatctgtgagacaaagcgggctgtttgacaaaacgaagcatcagcggaaaattcacagaatgacagaaatgttccattcgcttttggaccaaaatgaggttttggaaaaactgcaggcaagtttgagtacggctttccggtctttccgtttttcactgtttatcacgcaggatcaggatacggacagacagcttcccgcaaaagaattacatatggacggaaaagatgccgatccgtctgccctgaaggtttatttatcggggagactgctcagaaaaggcaggtcatctgcttatctgccgatcaaaggccagcaggggacttacggggttctgaagacggaggggctgcaggatgccgttctttcgtgcagtactctcagtgaaatgctgctgcttgcgggcgcagcgggaaaagcatttgaaaatgcgcagctctatgagcaatcgaaaaaaagcattgcgaatctggagctcattaatgaaacatcgcgccagctgaatcagcgcctcagactcactgatacgatgcgggagctcgccgccattatgacccaatcgtttcatgcggaagaagtggctttttttcatattgatcattttgagacgcaaaatctgcttccgggacataccgctttttttaagacagaacgtgcgaacccctatatcagcattgtgaaagaaaagctgttcgagggagaaaagggcgtgtttatcggcagcggaaagactgtattcggcgaaaacggtttcggctcgctgatggcggtgccgatgatcgaaaatgacaccgtcttcgggtttgcgattttattgaaaaaggatttgtatgcttttacgtttgaaatgtataagctttttcaagcgctcattcaccatgcgacattggcggtcacgaactccatgctgcgcgacaggcttgagcaccttgttcagacagaccagctgacggagctgtattcaagaacctatctggatgagaaaattcaatacagcatgaaaattcataaacggggtgtattcatcctcgttgatatcgataattttaaaagtattaatgatacatacggtcatcaaacgggagattcgatcctgattcaggtggcctccgttatgaagaaccatattcgtgagcatgatgtcgctgcgaggtgggggggcgaggagctggctgtctatctgccgaatatcaacgtgtcatccggagaacgcatcgctaaaaggctggttcgcgccatccgggaaaataccgagccgcgcgtgacgatttcctgcggcgtttcctgctggtcaaagaccggcccgatgccgttgaaattgctcgttcagcaagcggatgaggcgctttatatcgccaaacggaacggcaaaaaccggctgatcatccatcaaaacagcacgacgacataaaaaaggagccggcctgccggccgggctcctttttttatcctaatcgtttttcaagcgtttcaacaaactttgctaaataggtttcgtccgtttcatcaaaacggtttttcacggggctgtcaatgtccagcacaccgatcacttcaccgtttacgcggatcgggaggacgatttctgactgggaagccgcgtcacaggcgatatgtcccgggaacgcattcacatcggcaatccgctgcacgtcgccattagagtaggcagtgccgcatacgcctctgccgaacggaatgcgcacacaggcaggaagtccttgaaacggtccgagcacgagctcgccctctttagcgaagtaaaaccccgcccagttgacttcatgtaatgaatggtataaaagcgctgacgcattcgcgtaatttgcgatcgcatccgtttcatcttctgtcatggcttcgagctgtttaagcagaagctgataacttttttctttatctccggattgtttttcgacatgaaacatggaaaaccctcactttttctataatatcaaacaaagttccggccgttctgccggcatttgtcgagaagttcttacaggaacggcgcctttctgcttgaattgttacacataaaggggtgagccgtatgaaagtaaccaccaaagacaaaattattaacgccgctgtccagctgtttaaccaaaaaggttattccggcacgtccgtccgtgaaatcgcaaagtcagctgatgtaaatgttgcgcacatctcctactattttaaagggaaaggcggattaatggaacatttagtttccgagttttacgaaggctatactgaagcgctggaaaaagccgccgtcagtatgaacggtgaagacgcgcaggaacgcatcctgcgggtgattttcgatattttatcctatcagcacgataaccgtcaattaacgcggtttgtgtaccgggaagtgacgattgattccgtgcttatcagggaaattatgtctacttacttaatgaaagaaaaatatattttccagctggtgattgaagaagggcagtcacgccacaggcggctgacgctgcccgtgccgcattttattctgcaattgaaatccctcttgatgatgccgtatcttcagcctcaatatattacggaggtgctctatatgcagcctcatgaaccgtacttttataaaaggtattttgaagaggtgaagatctggatcgaaagcgtgttccgacggcctgatgcggcgcttatgaagtaatgatgcttttgtacgtttcgtaggaactgccgacatcttccgcttgatgggcgtccgacccgaatatgagtgggatttttttttgcttcgccgtctcagccatccaatcctccatgtatacttccccggcaaacttctttctgagcccggatgtattcacatccagctccattccgtgttctttcacggcgtcaagacagcgggccgcaagctctcttatttgaggtgacatgctgtaagggaaaaggcgcgcgaattttttgacgagcgtgatatggccgacccgttttggcttaaaggggccgagcggtgttacaatggaagaatacacggtttcatagtattgttcatatacggcttcaacgcttccgaagcggtcggcaagctgctgaaacgcgtgctcgtcaaaatcgaggcatatataagacgggccggtcttcaaaaaatgaacggataaaatgccgtcatccagtgaggggccgtacgtgttcagaaacgccgcggtttcctcttcataccctgagataaaatcggtttctagcccagtcagaatgctgatttgtccatcgtattcctttttcagctgtgacagccgctccaaataaacctccatctgtctgagatccatcgcgctgtcctgaagcggtacgggatcttgaaatgacggaggaaggggggcgtgctctgtaaatgtgatcgagtcaaagcctctttccagggccttttcgacatattgtttcagcgcatccttcgagccgtgagggcaaaaaggcgtgtggatatgagcgtctcgtttttccatttgtgtcactccattaaaaaattgcagaatcctgccgaaattatgcaaaaagtttttgatttctggtcaaaaaatgttggttacatggtatcataataacaatgaaaacgacagattttctcaatacatatattgaaatctttctgaatacataaaacaccctgacagattaagagaacaacaagggggctcattatggagttagtcatcggattattggttatactgctcgcgctctttgcggcgggctactttttcaggaaaaaaatttatacggaaattgaccggctggagtcatggaagattgaaattttaaatcgttcgatagtggaagaaatgtccaagatcaaacatctgaaaatgaccggagagacggaagagttctttgaaagatggcgcgaagagtgggatgaaattgtcacagcccatctgccgaaagtagaagagctcctttatgatgccgaagagaacgccgacaaataccggtttaaaaaagcgaatcaggtgcttgtccacatcgacgacctcctcactgcagccgaatcaaatatagaaggcatactgcgtgagatcagcgaccttgtgacgagcgaggaaaaaagccgcggagagattgaacaggtgcgtgagcggtattcaaaagcgcggaaaaatcttctggcgtacagccatctctacggagagctatataacagcctggagacggatctcgacgaaatctggagcggcataaaagagttcgaagaagagacggaaagcggcaattacatcaaagcgagaaaagtgctgcttgaacaggaccgcagactggatcagcttcagacatacatagatgacgttccgaaactgcttgcggactgtaaacagaccgtgcctaaccaaattgccaagctgaaagacggctaccgggaaatgacggaaaaaggctacaaattggagcatattcaaatcgaaaaagagctggagaccctcaccaatcaagtgaaacgggccgaaagcgcgcttttggaagaattagatgtcgacgaagcgtccgccattcttcagctgattgatgaaaccattcaatcgatgtatgaacagctggaaggcgaagtggaagccggacagtccgtattaagcaaaatgcctgagctgatcatcgcgtatgagaagctcgaggaagaaaaagaccgcacaaaaaccgaaacggagctcgtcaaggaaagctatcagctgacggcgggagaaatcggcagacagcatgccttcgaaaaacagctggaaacgatcggccgactccttgagcaggcgagagaaaagcttgacggcgagcatgtcgcttactcgctgctgattgaagaagtcgaggccatcgaaaagcagatggaagaggctcagaaagaacatgccgaataccgtgaaaatctgcaggcgctcagaaaagaagaactgcaggcgcgggaaacgctgatgcatcttcggaaaaccatttctgacacggcccgaatgctgcaaaaaagcaacgtgccgggaattccagaacaagtcaaggacaagctcgagacggcaaatcatcatatagaagaaaccgtcagccaattggaagagctgccgctgaacatggaggaagccgccaaacatctagccgaagccgaaaaggtggttgaggaagtcagcgaagaggcggaagatcttgtgattcaggtgaagctgattgagcggatcatccagtacggcaaccgcttccgaagccagaatcatattttatccgaacagctgaaagaagcggaacggctgttttacgcttacagctataatgaagcttatgagatggcggcagatgctgttgaaaaagcagctcccggcgccgtaaaaaaaattaaagctgatcaatctgcttcatagacgcataagcaaaaactgcaccctgatggaaatcagaggtgcagttttttagtttctcacggaatataaaaagcgcctgcggctgatatacatcaaaccgcaggcgctgaatgttacgattttgctttatttaattcgatgggcgggctggtaaaaaacgtgataatgcagccgatgatcgctccggcaatgcccggaagcacccagccgattcccatgctgtaaagcggaagatttgcgtttaagaatgaatctaatgatccgagcggaatgccggctgccttcaaaccgtccaggatactgaacagccccgttccgatcaggcaggcgatatagacttcgcgtctttccttaaagattttatcaataaaggaaaggacgataatgacaatcgccagcgggtaaatcgctgataaaataggaactgaaaatgcaataatctcagcaagtccgaaatttgaaatcgccagactgaacagcgtgacaatcgtaaccaccattttgtatgataaagcgggaatcaattttgaaaaatattcgccgcaagatgtgacaagtccgatgcttgtcgttaaacacgcaacggtgatggcggcgccgagaacgatgtttcccagtgaaccgaacaggtaatcagatgaagctgataaaatctttgcgccttcgccgagcggccccacagcgtccgtgcttgtcgctcccaaataggccaaagataaataaatgaatgtcaaacctgccgctgcaatcagacccgctttaatacaagcggcggcgagcgctttacgctgggtgacgcccctgcttttaacagcgttgacgacaacgacgccgaagacgattgaggcgagcgcatccattgttttatagccttccaaaaatcctttgaacaccggcgttccggaatatgcctgatgtacggcgcccagcccgcccatcggagtgacaatggcttttacgacgatgattaaaataataccgaatttaataggagtcaaaatctttccgactctgtccacgattttggacgggttaagagctaaataatacgtaatagaaaaaaagatcaacgtgaaaacaaataaagataatctttccggaatgccgcttaaaaacggaactgcaccgatttcatatgaaacggttccggttctcggaatcgcgaaaagcggcccgattgataaataaagcacaacggtgaaaatagtcccgaataccggatgagctttatcggcaagccctttcgcgtctttgcccgttaatgcgatagcgataatacccaaaagcggcagacctacgccggtcagtaagaaaccgcccatcgctttccagacattatgccccgccgcttgcccgagctccggcggatatatcatatttcctgccccgaaaaaaagtgcgaaaagcatgaaaccgataataacggtatctttgacaggtagtgagtgtttcataaaaatcctcctaaatactatgttgaaatattctgtcaattaattgtcagataatataacaaaacgaacattacttattatatggcaatgtacagataagtcaatactcgatttattgcgaatttatatttacttttgttatggtagcataaatatcatacgatgtaccgttttcattaaaggagtaaaaaaaatgatatatttagacaacagctcaacgaccgagccgtatgaagaggttttggaagtgtataaacagacgagcagccgttatttcggcaacccttcgtctctgcaccagttaggaactgagacggaacagctccttgaagcggccgctcagcaaataaaaaaaaccttacgtttaaaaaattatgatattgtatttacatcaggcgcgactgaagcgaataacgcggcgttaaagggagcggcctgggcaaacatgagtaaaggaagacatatcattgcttcggcgattgagcatccttctgtgacggagacgcttgatcagctgacggagttgttcggctttgaagtcacatatcttccggccgatcaaaacggcttcgtttctttgaaagacgtcaaatcggctatcaggccggatacgataatcgtcagcgtcatgcatgtcaataacgaagtcggctccattcagcctgtaaaggaaatcggcgggtttttgaagcagcaccggaatattctgtttcatgttgatcatgtgcagggcattcataaagttcctctgtctatagaagaagcgggcattgacctttgcaccgtttcagggcataagtttcacggcttaaaagggaccggagcgcttatcgtcaaaaaaggaacgcggctcattccgcttataacgggcggctcgcagcaaaaaggcgtccgcgccggaacggaacacacggcaggcgccgtttcccttgcgaaagcgatcaatctttctgcgcgtgacatgaacgagcggctttcttccgtggaggctgccaagaatgcgctcatggaaaggctgagcgggacggacggggtcgtcatcaacacccccgccgaaaacagcgcgccgcatatcattaatttttccgttccgggcgtgaaggcggaagtgctgctgcacatgcttgaggaaaaaggaatatatgtctccacaaccgcggcatgttcggcaagagagcacaaaccgagccgtgttcttctgcaaatgaataaaggcgaacagattgcatcaagcagcataagagtcagcctgaacttcagccatacggctgacatcacggagccgtttatggccgcgttggtgccggctgttcaaaaactaaaaaaaatgatgaggtagcatatgaattacgatcatattttaatccgttttggtgaaatatccacaaaaggaaaaaacagacgcagttttattgaaagattaaaacagaatatccgcctggtattaaaggattataaaaaagtaaaatacttttcaaaccgggaccggatgtcaattacacttaatggagaaaacccggaggaaatttgttccttattaaagaatatattcggcattcaaagctttagtctcgcaattaaatgcgaaagcaagctggaagacattaaaaaaacggctttagccgcgatagaaggcgaatataaaccggggaatacgtttaaggtcgaaaccaaacgggcttacaaacagtttgaattagatacgaatgcgatgaacgctgaaatgggcggccatattttgaaaaacacggatggattaaccgtcgatgtgaaacatcccgatattccgcttcggattgaaatcagggaggaagcgacattcctgaccattcgtaacgaaaaaggcgccggaggccttcctgtcggttccgcgggtaaagcgatgctgatgctttccggcggttttgacagtccggtcgccggtttttacgcgatgaaacggggattatcagttgaagcggtacatttcttcagtccgccgtatacgagtgaacgggcaaagcagaaagtcatggatctcgcgggatgccttgcgaagttcggcggcagtatgacacttcatatcgtgccgtttacaaagacgcaggaactcatccaaaaacaaatcccggagaactatacgatgacggcgacgcggcgtcttatgctgcaaatcgcggacagaatcagagaagaacggaaagcgctcgcgatcattacgggagaaagcctcgggcaggtagcgagccagacgcttgaaagcatgtatgcgatcaatgcggtgacggcaacaccggttttgcgccctttaatcggaatggacaaaacagaaatcattgagaaatcaaaagaaatcggcacttatgaaacaagcattcagccgtttgaggactgctgcaccatctttacgccgccaagtccgaagacacgtccgaaaaaagaaaaaatcgagcacttcgaaagcttcgttgattttgaaccgctgattgcagaggccgctgccggcatcgaaaccatcactgtttactcggagcaggaagctcacgataagtttgccggcctgttttaaaactgtatacaattaccaaagtttttttgaatgaagacatgtgttttatcacattctatactcacaaggaggtgatacacatgtcacaacaatcaaacagcggaaacagcaaccagcttttagtgccaggcgctgctcaagctatcgaccaaatgaagtatgaaatcgcttctgaattcggtgtaaaccttggaccggaaacaacttctcgcgccaacggttctgtcggtggagaaatcacaaaacgtcttgtctcttttgctcagcaaagcatgggcggaagcagccagcagcagttttaatcacaacttcacataatggctaagagagcggggaattccccgctcttttttcatgggaatagatagaaggcgggaagcaatttatgcatatttttattgtaatggcctatgtttatgtataatggggaaagaaagtgaggagttgttcgtgttaaaacgagaagatttaatcgccccaaagaactataaccttgtaaatgaaatcgaaaagttcagccgttccaaagagaagaacgcgcttatttgggaagatcaaacaggcggcaagaaagtctggacgtatgaaaaattgatggaagaaacgaataaaatcggagcccgcctgaaaggtctcggatttgacaaaggcgataagctgattgtcatggttccgagagtgcttgaagcgtatgccgtttatttagcgatcttaaaagcggggatggtcgtcattccttgctcggaaatgctgcgcgccaaagaccttgaataccggatcaaacacgccgaagtgaaaggcgctatcgtttatccttcatttataaacgcgtttgacgaggtaaatactgatcagctggtgacattgtcaatcggtgaaaatgatgccggctggaaaaacctcctaacgattgaagcggacggagacagttttcaaacagctgatacaacaagagaagacatggcgtttttgtcctatacttcaggcacgaccggccagcctaaaggcgttgtacatacacacggctgggcctttgcccatttaaaaacatcagccggtgcatggctggatatttctgaagacgatacagtgtgggccaccgcggcgcccggctggcagaaatgggtgtggagcccgctgctcgccgttctgggaagcggcgcgacaggattcatttatcacggcagattcagcgccaagacgtatttagagctgctggagcgccatcaagtaaatgtcttctgctgtaccccgacggaataccgcctgatggcaaaagtggaggagttggacaaatatgatctttctgcccttcacagcgcagtttctgcgggtgagccattaaaccgggaagtcattgacgtattccgaaagcatttcggcattaaagtgagagacggatacggccaaacggagagcaccctgttagtcggcgtcctgaaggatatggatattaagccgggaagcatgggcaaaccgacccctggaaatcaagtggagattataaacgataaaggcgaaatatgcgaaactggcgaaacgggcgatatcgccgtgcatttgagcacaccggccttattcaaggaatattataaagatcccgaaagaacgaaaaagcagattcgcggagattactttcttacaggagaccgcgcgaaaaaagacgaggacggctacttttggtttgagagccgcaatgatgacatcatcgtcagctccggatatacaatcgggccttttgaagtagaagacgcgcttgtgaagcatccggaagtgaaagaatgtgccgtcgtggcgagcccggatgaaatcagaggttcaatcgtaaaagcctatgtcgttttacaagacgatgaaaagcgcagtgacgaacttgtcaaagaactgcaaaaccacgtaaaaacgattacggcgccttacaaatatccgagagaaattgagtttgtcgaaagcctgccgaaaacggcgtccgcaaaaatcagacgtgtggagctgagacagcgtgaagaacggctgaaggctgataaaaaagcataatacaggataaagggtgagcggggatgaaagcgatttggcacggcggcaccatctatacaatgctggacaagaatcatgtcactgaagcgatttataccgaagaaggcgtcatcaggcagacgggcagcttccgggagctccaaggaacatacggttcgccttgtacggaggaaatcgatttacatggggctgtcatgttcccggggtttacggacagtcatatgcatttaatcggacacggggaaaaacagcttcgcctcgatttgtcgcagctgacgtcaaaagaagcgatactgcgggccgcaaaagaagcagagcgtgaattggaagatggcgaatggctgatcggcgaaggctgggatgaaaatctgtttgaacagccggattacatcacgaagcatgaccttgacccgctctttcccgaccgccccgtcctgctgaagcgggtatgcaggcacgccgccgcggttaattcagccgcattgcgcgcggcgggaattacaaacgaaacacctgatccaaacggcggaattatcgtccgggacggcaccggtccgacaggccttctgctggataaagcccaagagcttgtgacacaggccctgccgcccgtctcacttccctatgtcaaacgcgcgcttcaaacggcgattacggactgctggtcaaaaggcctgaccggcgggcattcagaagatctggcatactacggagacgcgtccgttcccgttgccgcgtacgagtcattaaccggcagcggcctttatccttttcgcgcccatctgctcgttcatcacgaagccgtcgacagctggagcgctctggataaatcgaccggaccttatctggaatacggagcgatgaaaatttttgctgacggcgcgctcggcggcagaaccgctctattgaaaaagccttatcatgatgatccgtctgtttccggcgttcaggtgcatgatgacgaaacccttgccgctcttgtttataaagcgagagagaaagggatggagatcgccgtgcacgcgattggcgaccttgcatttgaaaaggtgctggatgttatcgaaagatacccggcaaagcccggacagctagacaggctcattcatgcgcaagtattagatgacggattgattgaaagagccgcccggctgccgatcggacttgatcttcagccgcattttgtggccagtgattttccgtgggtgattgaccggctcggagaagagcggatgaaaacggctttcgcctggaaaacactgctgtcaaaagagctgctgtgcgccggaggttcagatgccccgattgaaccggccgatccgcttctgggcattcaatcggctgtgctccgtacgagcaagcagcacccggaaggtccggcctattatgaaaaagagtgcctgactgtgtacgaagccattcagctttacacggagggaagcgcggccatcatccataaagaacatagccgcggacggatcgcccccggctatgatgccgactttaccgtactcagcggtgatccgttcaggacggacccgaaaaagcttcatgaattggaagctgtcaaaaccgtcgtcggcggccgtatcgtatatgaaaaagaggacaggcagtgatgcccgtcctctttttttatgataaaaatgatcgttttactttttcccagaaagagttgtctttcagtttcaccgttttgatttttttatcggatagtctaatctcaacctttttgacattccgcgtgctgagcgcttcattatcaagcccgataatcggatgctcattgccgtcttgcaccacctgcagtgtcagcttccggtctgagcttaaaataaacgaagatccgagtgtacggtatgtgttgttgttcaacgatgccagttcggatacctgcatgcaggaaatcaaaggatcaacaacggcgcctgaaacagatttattgtaggcggtgctgcccgtcggggtggaaatgatcatcccgtctcctctgaacgtctcaaaatgaagatcatcaattaacacatccatcacaaacgttttaataatgcttgaacggatggaaacctcgtttaaacagtgaaaatgattgctgccgtccaccgttacgtgaatgagcgggtattttctgacctcaagctgttccgcggtcatgctggccgccattttttcaggctcatcgctgtgaaaatcacagtacaaatgggctttcccttttttagcgatgccgacatacaggcagtcatcacggaatccggtttttctgacggcttgcagaaatgagccgtcgctgccgatgctggcgataattccggcatcctccggttgagccgcaactgtaaaaccgtgcgattcagcaagctgcttcaaagagctgacttgttcttttgtttcgttgttttgtttgtgaaaaaaataaacattgcggcgaagatcggtcatatccccattcccctttgctgtcatatttacgtttttctcccagcaggtattgtgttaaaatacctgtggcaatagtgtaacatgttccctgtttatccgttaagggaaagcgcttcatgaaaaaaatgaatctttttttacggggaaacgtacgaatattgacagaaaaggaggagaacaaatgaatgcaaaaagatggattgcgctcgtcatcgcgctcggcattttcggcgtatcagtcattgcaagtgtgaccgtcggggtgctgaagaatatcggagatacagggtctgactttgcatcactgacagatgacacagaggaagtgacgctggataagggcagtcccggcagtaaaatcgccgtgcttgaagtggacggcacgattgaggataacggcgggtccgctggcctgctcagctcaggcgggtatgatcacagatcatttttaaaacaggttgagcgtgcgaaagaagacaaaagcgtcaaaggaattgtgctgaaaatcaattcccctggcggaggcgtgtacgaaagcgcggaaatacataaaaaactggaagaactaaagaaagaaacgaagaaaccgatttatgtatccatgggctccatggcggcatcgggaggctattatatttcaacggccgccgataaaatctatgcttcaccggaaacgctcacgggttcactgggcgtcatcatggaaagcgtcaattattccaagctcgccgatgaactcggcatcaagtttgaaaccattaaaagcggcgcgcataaagacatcatgtccccgacccgcgacatgacgaaggaagaaagaaagatcatgcagacaatggtcaacgattcttatgaaggatttgtcaatgtcatttcaaaaggccggcacatgtcaaaagcggatgtgaaaaaaattgccgacggccgtgtttacgacggcagacaagcgaaaaaaatcggcctcgttgatgagctcggtttttacgatgatacgatcagcgcgatgaaaaaggaccataaaaatatgaaaaacgcttcagtcatcacatacgaggaaggattcggattaggctcgctcttttccatgagcgcagcgaaaatgtttaaaagcgaaattgattttctgaatatgaaagaactcatttcgcaatccggttcgccgcggatgatgtatctctatgcaaagtaggggggaagaaagaatggacgcgacttacgaaggctttcacggcaaagaagaggaagccgaacaacagagggcgcccgagcaggcatatgcgggcttttggatcaggttttgggcgtttcttcttgattggctggtggtctggggacttaaccatctcatcgtttcaccgattttcacgctgatgaagctcccggcaacaagcggaatgtttacaatctcagcttattccgtcacaaccctgatcgtctacctcgcctattttgtgttcatgacgaaatggtttcatcagacactcggcaagatggtcttcgggttaaaggtcacttctttgacgcccggaaagccgctgacttggagcaccgtcattttcagagaagcggtggggcgttatatcgataaaatctggattctctatatcgtcattgcgtttacgcccaaaaagcagggcattcatgatctgatcgccgacacaacggtaattcacgaagcgctgtaccgcaaataaaagcagtaaacccggaataaacgtccgggtttattttttttggttttggcgataatgctgctaaggaagtgaagcttatgggatatgccgcagcagctgttattctcattctcattttggcctggctgctcatgaggatgaaaatccatctgactttcgaatatcttcacgataaagataacgacaaactgacgtttaaactctcggccttatacgggctgatccgtattaaaaaaacgctgcccgtcattaaagtaaacagcgaagacgcgtcaattgatgtcaaacaggacacaaaatcagaaatgaaaggtcagaaaaaagagaagaaaaaaatcacatatgaagatgtcaaacagagcattcacagaatagaaatgattctgcaccaagtctttcagatgcgccaaatcgccgcttcatttcttgcgggagtccgtgttacgaagttcgaatgggtgacggttatcggaataaaggacgccgccgttacgggaatcgccgccggcggattgtgggccgtaaagggaggcctgacggcgatgctgtatgatcatctgcgtttcatacataaaccggtgtgcgaagtcattccgtcttttcaagtgcctgcatccaagacgcatttgcagtgtatattcttttttcgttttggacatcttataggtgcagctttcaaattgctcaaatacgggcggaacggactttctatcatacgaaagaaacagccggttccggttgcttcaaagaatgattcatcagtttaaggaggagcgcatatggcagaccatcccattcaaggtttaatgaaaaccgctatggaaaatttaaaagaaatgattgacgtgaatacaatcatcggcgatcctgttgaaacgcctgacggcagcgtaatcttaacggtttcaaaggtcggcttcggatttgcggcgggcggaagcgagtttggaggaaagccggctgaaaaaagaaccgatgatgatgaaagaaaagagcagaagctcccgttcggcggcggaagcggcggcggagtatccattacgccgattgcgtttctgattgtcggaacaaacggcgtgcgcatgcttcatttagacgaaaacacccacctgattgataaactgttagactccgcgcctcaaacgattgaacgcatccagcatatgtttaaaaagaatgaaaaaggccggaaccaaaaaagaacggatatcgatttataatagaaaagttaactgccgcccgcagttagctttttttacgatgcggcataacctttgcagtttgcataaaactcgactatgatagagctatacatagataaagggaggaatcagaatggctgaaattacatttaaaggcggagccgtgacgctgatcggacaagaagtgaaaccgggtgaccaagctcctgacttcacggttctgacaaacggattagaagagaagacattagcagatatgaaagggaaagtaacgatcatatccgttattccttccattgacacaggcgtatgtgacgcgcagacacgccgcttcaacgaagaagccgcaaaactcggtgatgtgaacgtttatacaatcagcgccgaccttccgtttgcacaagcgcgctggtgcggagcgaacggaattgataaagttgaaacattatcggatcataaagagatgtcatttggtgaagcattcggtgttcacatcaaagaacttcgtcttttggcacgttccgtatttgtccttgatcaggacggaaaagtcgtttacgcggaatacgtaagcgaagcgacaaaccacccgaattatgaaaagcctatcgaagctgcaaaagcgttaatcaagtaaagagagaaaaagagctccgggtgctgccgcggagctcttttcatggcaaggaggaaacagcatgcaacacgaccatgtcggtcagatttatgaacttttagatgaagccgcccaagtgatagcagaaggccttcagatttcttatattgaggggcttgcggaagcgggagaaatgtattttcttgaaaaggccgaccagcttccgcttcaggaaaagcaaaccggcgagcttaacagcctgcttgcgaaagcagacttcagaaagtgggagcatgaatggatccgcaaggcgttccagctcgccattttaaaagggctgaaagataagtcccatccgaacagacagatgacgcctgatacgatcggcattttcatcagttacctcgtgaataaatttacgggcggccgaaaaggcctgacattgctggaccccgcctgcggcaccggaaatcttctgctgaccgcggcaaaccagctttctgacaaagcggcaaaaagcttcggcattgaaatcgacgatgtccttctgaagatcgcttatgctcaggcgaatctgcaggaaaaagaaatggagctgttctgccaggacagtcttcagccgttatttatcgaaccggccgatgcggtcatctgcgatttgccggtcggctactatccgaatgacgaaggcgctgaagcgtttgagctgaaagcggatgaaggccactcttttgctcaccacttatttattgagcagagcgtcaaacatacaaaaccgggcggatacttattttttatgattccgaaccatctgtttgacagcgcgcaaagcgataaactgaagcggttttttgcggaaaaagtgtatatcaacgcccttcttcagctgccggctactatgtttaaagacgaagcgcaggcaaagagcattttaatcttgcagaaaaaaggcgaagacgcaaagccgccgaaacaagcgcttttggcgaatcttccttcctttgcgaaccagcaggcgatgcgggaaatgacggcaaaattggatcaatggattcaaaaagaaaaataatggcgaagaagcagtgtgagatgcaaaatcccgcactgcttttgctttttaaaatgaatggaaatcaggacgataacacaaattaaggaaagaaaataacatttcgtaagaccgtgccgtccatttggcacaaatgaaatttatcagaaaatatcgacttcatattgtaagcggtaccaatgtggatgttgacttgaaatgctgagttgacaatgtttaaatggaaaagtcagatattttttggactgcaattatggtctgggaaaaaagaacgaacaaacgaagaagaattttgataggagcgtcatttatgtctaaaattattgcaattaacgcaggaagctcatctttaaaatttcagttattcgaaatgccttcagaaaaggtgctaacaaaaggtttagtagaacggatcggtatcgccgacagcgttttcacaatctctgttaacggcgaaaaaaatacagaagtgacagatattccggatcatgcggttgcggtgaagatgctgcttcacaagctgactgaattcggtattataaaggatttaaatgaaattgacggaatcggccaccgtgtggttcacggcggagaaaaattcagcgattctgttttgcttacggatgaaacaatccgtgagattgaagagatttcagaactagcgccgcttcacaacccggctaacatcgtcggcattaaagcctttaaagaagtgcttccgaatgtgcctgcggttgcagtgtttgatacggcgttccaccaaacgatgcctgaacaatcttacctgtacagcctaccgtacgaatactacgagaaatacggcattcgcaaatatggtttccacggcacatctcataaatacgtgacacagcgcgcagctgagcttctcggccgcccgcttgaagatttgcgtctgatttcctgccacctcggtaacggcgcaagtatcgcggcggtagaaggcggaaaatccattgatacgtcaatgggcttcacaccgcttgcgggtgttgcgatgggaacacgttcaggaaacatcgaccctgcattgattccgtacattatggaaaaaacggatcagacggcagatgaagtattaaatacgttaaataaaaagagcggactgcttggcgtatccggtttctccagcgacctacgcgatatcgtggaagcttcaaaagaaggaaacgaaagagcggaaacggctcttgaagtgttcgcaagcagaatccataaatacatcggttcttacgctgcgagaatgagcggcgttgacgcgattattttcactgcgggtatcggtgaaaacagcgttgaagtcagagaacgcgtgcttcgcggcttagaattcatgggtgtatattgggatcctgcgctgaacaacgtgcgcggcgaggaagcgtttatcagctaccctcactctcctgtcaaagtcatgatcattccgactgacgaagaggtcatgatcgcacgcgacgttgtccgccttgcacagtaatgatcgaaaaaagcacatccttttagggtgtgcttttttattgaatgccccagaatcaaacgttacgatatgtttaatacataaacgatgaggtgaagcaatgagtgtgcatgaacataaacaagaagccccgtcagccgtgcgctgcaaggtgatcacagtcagcgacacgagaacgaaagaaaccgacaaaagcgggcgcgtcatgatggacttcctcagggaagcgggatttgaaacggtcgcttatgacattgttaaagatgaaaaagatgaattgcagaaagccgttttatccggctgtatggatgaatatacagatgcggtgctgttaaacggagggacgggcattgccgaaagggatgtcacaattgaagcggtcacgccgctgttttcaaaagagctcccgggattcggcgagctgttccgcatgctgagctatacggaggacatcggttccgccgccattttgtccagagcggcagcgggtgtgatccaaaataccgcagtcttctgcacgcccggctcttcaggcgccgtaaagcttgcaatgagtaaactgattattcctgaactgccccatgtgctccgggaaatccgaaaagatttataaatgtataaaaagactctgctccgctcaaaaaattgggtggggttttttttataaaaggcttgaaaaaacagaatttacttgttacagtgtatacatacaaaatgcatttttattaattaaaactaatttttatacaaaagggagcttttaacatggcagaacaaaaaaaggttgtattggcatactcaggaggtcttgatacttctgtagcgataaaatggctgcaagaacagggatacgatgttgttgcctgttgcttagacgtaggggaaggaaaggatttggcattcgttcagcaaaaagcgctggaagtaggcgccgtaaattcctatgtgattgatgcgaaagaagaattcgcccgggagtacgcgctcatttctatgcaggcccatacaatgtatgaaggcaagtatccgctcgtatctgcactatcccgtccgttgatcgcgaaaaaactcgttgaagtcgcggaaaaggaaaacgcggtggccgtagcgcacggctgcacgggaaaaggcaacgatcaggtgcgtttcgaagtatccattaaatcattaaatcctgatctggaggtcattgctccggttcgtgagtggcaatggtcgcgtgaagaagaaattgaatatgccgcaagccgcggcataccgattccgatcaatcttgacagcccgtattccatcgaccagaacctatggggacgcgccaatgaatgcggtatattagaagacccgtgggcggcgccgcctgaaggggcatatgacctgacagcatctcttgaaaacacgccggacgttccggaaatcatcgaaatcgcatttgaagccggtgttccggtttcaatcgacggcgtaacctacccgctcgctgatttaattctcaagctgaacgagactgccggaaaacacggcatcggccggattgaccatgtggaaaaccgcctggtcggcattaagtcccgtgaagtttatgagtgcccgggcgccatgactttgattacggctcacaaagaacttgaggatctgactttagtgaaagaagtggcccatttcaaaccggcaattgaacaaaaactgtctgaaatcatctataacggtttatggttctcgccgttaaaagacgcgctgcttgcattcttgaaagaaacccaaaaacacgtcaccggcgtcgtgcgcgtcaagctgtttaaaggccatgccattgtagaaggacgtaagtcggaatattcactctacgacgaaaaacttgcgacatatacaaaagacgatgcttttgaccatcacgcggcaatcggtttcattgagctttgggggctgccgacaaaagtaaacagcattgtgaaaaagaaggagcagattgaagcatgaagaagctttggggaggccgttttcaaaaaacaccggaaaagtgggtcgatgagttcggcgcatccatcacattcgaccaaaacttagtcaaagaggatattacagggtctctcgctcatgcggcaatgctgaaaaaatgcggcattctgacggaagaagaagaaggcgccatccgacaggggctgcagaccctcctgcaaaaagcagatgaaggaacgcttgaattctctgttgattatgaagatatccatttgaatattgaaaaaatgctgatcgaagaaatcggaccgctaggcggcaagctccataccggcagaagccggaatgaccaggtggcgaccgacatgcatttgtatttgaaagatcatgtctcacatatcatcgtgctgattgaacagttccaaaaagcgctgatcgaaaaagcggaggccaatgtcgagaccattctgccggggtacacccatttacagcgggctcagccgatttctttcgcccaccatctgcttgcttatttttggatgcttgaacgggataaagagcgttttcgcgatgctatgaagcggattaacatatcgccgctcggatgcggggcgcttgccggaaccacgtttccgatagaccgtaactattcggcggagctgctcggttttgactccatttatgagaacagtcttgacggagtcagtgacagagattttattctcgagtttttaagcggcagcagcatgctgatgatgcacctttcgcgtttatcagaagaaatcattctatggtgctcgcaggaattcagattcattgaactggatgatacgtatgcgacgggaagcagcatgatgccgcagaagaaaaaccccgacatggcggagctgatccgcggtaaaaccggacgcgtatacggtgatatgatggggcttttcacgattatgaaagggctcccgctcgcttacaacaaagacctgcaggaagataaagaaggcatgtttgacacggtgaaaaccgttgaaggaagccttcagattttcacgggcatgattgaaacgatgaaagtaaacaaagacatcatgaaacaagcgacaaaacaagatttttcaaacgcgacggaacttgccgattatttagctaaaaaaggcatgccgttcagagaagcgcatgaagtggtcggcaagcttgtgtacagctgcattgaaaaaggaatctatttaagtgatatggcatttgaagaattccttcaagccagcagtctctttgaagaagacatctataccgtgctcgatccgcatcatgcggttgaaaaaagaatgagcgccggcggaacgggttttcagcaggtagaacaggcgctcgtaaaagcaaaagcctgcgccggcatttaatttgctgaaatttccttcatattttcccgtcatatcagacaccctacatctataaagatgggaggtagaaggaatgcgcaaagaacaagaccgttacatctatgatgaaaaagaaagtgaagaaacggccaggctcatctcagaggcatacgaaagcggttatgtcggcatggaggaagcctctgctccttcagaaaattaagctgtctataaagacggcttttttttcgtgcggacgaagtgcaaaaaagtgatattgccgtttgtttatagtaaagtagagggagaaacgtcttgattttattgaagcggcaacgttgcctggggagggtattcaatgtgcgacatgctctaatcactgccggtacaaagggattgggccgaaaagtgactgaaatgcttctggaaaaaggcttttctgtcacagtgaattacagacaagacgaagaagcggtcgcctgtctgaaggcggattatcccgggtgccatgacagattgcaattcgttaagggcgatgtaacccggaaagaagatctcatgcggatcgccgatgcagcccttcagcggtttggaaggattgacatactgattaacaatgccggaccgtacatatttgagcgcaaaaagcttgccgattattccgatgacgaatggtatgacatgcttgaagggaatttaagcgccgttttccatctgtttaaagcggttatcccggtcatgagacagcagcggttcggccggattattacatacggttttcaaggagcggatcatgcccccggctggcttcaccgttccgctttcggagcggctaaagtcggattggcttcgttaacgaaaaccattgcgattgaagaagctgaatcaggcattaccgccaatatggtctgcccgggtgatattgtaggagatatgaaagaagcgtctatagaggaagcaagacgggaaatcggcaaagaaaagacgccgatcggcaggtccggaaccggagaggacattgcgagaatcatcgcctttttatgtgaagatgattccgatcttgtaaccggaacggtcattgaagcaacaggcgggctgaatgtgattaacaggcatcaatccctgtaagttttttcgtttgtcaaaaagggaatttgataaatattaattttttatgaggtgaaaacgatgaaagtgacttatcacggacattctgtcattcaagtggaaacgaaaacccataacattatttttgatccgtttctgaccggaaacagtctgacaaatttgaaaccggaagaagtgaaagcggatgtcatcctgcttactcacggacacaatgaccatgtcggagatacagagcagatcgccaaacaaaacgatgcgctcgtcattgcgccgaacgagctggccgtttatctcggctttaaaggtttaaacgtccacccgatgcatatcggcggagcgcgccaatttgatttcggtaaagtgaaactgacacaggcattccacggatcggcggtcactgatgaagaaaacaaaaccattacgtacacggggatgccggccgggattttattgacgattgacggcaaaacgattttccacgccggggacacggcgctgttctctgatatgaaactgatcggggaactgaatcacattgacttggcgtttctgccgatcggtgataacttcaccatgggccctgaagatgcgaaactcgcggctgaatggctgagagcgaaacaggtcgttcccgttcattacaatacatttcctgtcattgaacaggaccctgacgctttcgccgaaagtctgcccggaggcgtcggcaaagtcatggcggtcggcgagaccattgagcttgcctgacatatgtgtcaaagaccttctgaatcaagcattcagaaggtctttttgtgatgccgccttttttcgggcgtctcattgcgaatgaatcccccgtacccttataataaaagcagaagactgtccttagaggtgaaacgcttggcaacaaagcatgaacaaatcctatcatacatagattcgcttcctgtcggtgaaaaaatttcggtcagaagaattgcgaaagaaatgaaagtcagtgaaggaacggcttacagagccattaaggaagccgaaaacaaaggattcgtttccactattgaacgtgtggggaccatccggattgaacagaagaaaaaagaaaatattgaaaagctgacatacgccgaggtcgtcaatgtgatagacggccaggtgctcggcggaaaagccggtctgcataaaacgttgaataagtttgtgatcggcgcgatggagcttgacgcgatgatgcgttatacggcggcggggaacctgttaatcgtcgggaaccgaatcaacgcccaccgccaggcgcttgaagcgggcgcggctgttttggtaacgggagggtttaataccgacgacagcattatcgagctggccgatatgcttgagcttccgattctctccacgagctacgatacctttacggtagccgcgatgatcaaccgggcgatctatgatcagctcataaaaaaagagattgtgctcgtggaagacattttgacgcccgcagatcggacagtgacgctgtctcctaaggataagctggagaaatggtacgaaaaaaactatgaaaccggacacggccgctttccggtgatcgatcagcagatgaaaatccacgggatcctcacatcgaaagatatcgcggggcatgaccggtcagttccgattgaaaaagtaatgaccaaaaaccctgtcacggtgatcgggaaaacatctgtcgcctcagcggctcaaatgatggtttgggaaggaattgaagtgcttccggtgacagacgggcatcacaaactgatcggaatgatcagccgccaggatgtcttaaaagcgcttcaaatggttcaaaagcagcctcaggtcggggaaaagctggatgatattgtttcaaggggatttaaagaagacgaagatgacaaaacgccggccgtttatcaatatgaagtcacgccgcaaatgaccaatcagctcggcacgatttcttacggggtgtttacgacgattttaacccaggccgccagccgatttttacgctcccgcaaacgcggcgagctggtcattgaaagcattacgattttcttcctgaagcccgtacagatggagtcggtcattgaagtgaaaccgcgcattttagaggcgggccggaaattcgggaaaatggaagtggaagtgtcaagccaaagcggcatcgtttcaaaagcgatgctcatggtgcagctgatggagagaagttaagggacgcacccgggtcccttggcattcattatgcgtggtccctctccgcttcctttgcatggatgggctcataatgcttataggctttatacccggcccatgcgctgcctgctccgattaaaatgaagacgccgccgatgaccatggtcaggacggagtgaaacagaatcatttggtttactccgtacaaaaacaccagcgcgcctaatgccatacttgatttagccgaaaaacattccttctccagcgcccgtttcgtctggattccttttactttgtaatacacgtaaaagcaggcagaaagcccgatgagaaaaacaaaaaccagcataaatgaaatcctccattatatgagtttgcaaaaccgtttataccgttgctgaaagattttccttttccatggataaagagtatgattaaatgaataaaaacgaaaaggagaaagcgatgaaatccgaactgatcagaaccatatcattatatgacaccattatcttacatagacatgtgaggcctgacccggacgcctacggttcacagtgcggccttacggaaatcctgcgggaaacgtatcccgaaaaaaatatttttgccgtcggacagcctgagccgtccttgtcttttttatattccctcgatgaggtggatgacgaaacctataaagatgctcttgtcatcgtgtgcgacaccgcaaaccagggcaggatcgacgatcagcgctaccattccggcgcaaagctcatgaaaatagaccaccatccaaatgaagatccgtatggcgatctgttatgggtcgatacgaatgcaagctccgtaagcgaaatgatctatgagctgtacctggaaggaaaacagcacggctggaaactgaatacgaaagcagctgagctgatctacgcgggtatcgtcggtgatacggggcgtttcttattcccgaacaccacaaaaaagacattaaaatacgcgggagagctcattgagttcccattttcatcgtcagaactgttcaatcaattgtatgaaacaaaattaaatgtggtgaagcttaatggctttatttatcaaaatgtgtcactgtctgaaaacggcgtcgcttccgttttcattaaaaaagacattttggagacatatggaaccaccgcttctgaagcgtcgcagcttgtcggaacactcggaaatatttcgggtatccgcgcttgggtgtttttcgtagaagaagacgatcaaatcagagtccggttccgttcaaaaggtccggtcatcaacggaattgcccggaaatacaatggcggcggacatccgcttgcggccggcgcatccatcttcagctgggatgaaaccgatcagattcttgctgatctggaagaggtatgtaacgaacacaagtagaggggagaccctctttcttagtgttcatctgtcacggggatgaaccagcagccgaattcagtcaggtcttcgtagacgcggagattacagatttggagttctttttttatgagggaagcgagtgtgtctgtttctgcatatgcggaatagccttgtctgattcgggctgcatgatcttttgccaagcgtcgttcactaaaaacctccattttcccttcctcccttcagaatcattgaaaatgtctcatctacagtttataaaaaagcggagaaaaaagcgacagatctatggaaaatttttaaaaatgacataattacgtcgcaaaagaaatatgaatttcgacagacaatctcgtataaatcgtcagttcctttacttcagctttaaattccttctcatttatggtgtatattttgttttcgatcgtccgttttaaaagctcctttgttttatacacgctttcaatatcttttgtgatgacttcagaaatattatctttcacttgttcctcaaatttcatcttgtcaggctgggcgattctgtatttttccccattgattagcttcacatcaacactttggatgagaagtctttgcttattatcctcatttaatttatgaagatccttctgatagatggagatttggttttttaaatcccgcgcgtgctcacgctgcttttcaattaacgtcacttgttcttcctgaaacgttccgtatgtaaacagaaagaacacccagctgacgatggctccgcacatcattcccgcaaaaaaacgctgccatcccggttttttataatactcgggaattctcatgatgacatattctcctgggtcagccatgaaataatcagccagccggtctgcgcgccgcccattgctgaaataattaaaagaagctgtttgaagatgtcgcgcgtgttgccttcgaacagcccccgctcgaaactgtataccgcgtcaaatgttcccccgatggccgcgacaagcgcccagatcttcagcctgttcgccaattttgtgatcgccgtcagcggaggctcgcctgataaataagctccgaggccgccgatcagcgcgccgccgagcaacacaccgagggcgataaaataactgctgatgaaattcgccataaatccggcttcctgatccatatatacaccacctcacttttctatcatattgagcgaaacggacaagtatgatgatgagtcaaaaaagaacatttgtttcttaagaaaacccgtcttataatgtagaaaggcaaaatgaacgtatgggaaaggagtggcggcattgtcttttgttcacctgcaagtacatagcggctacagtctgttaaacagcgccgcttctgtaaaagagcttgttacacaagcgaaggaactcggatattcatcattggcgctgacggacgaaaatgtgatgtacggcgccattgagttttataaagcatgcaaatcaaacggaatgaagccgattatcggtctgacggcttctatatacacggacgatacggagcttgaagcacacccgctcattcttttagcagagacaaacaccggatatcagaacctggtgaaaatctcaagtgcgctgcaatccatggcaaagggcggcatgaagcgaaaatggatgaagagctatcatgaggggctgatcgccattacgcccggtgaaaacgggtacattgaaagcctgcttcaagccgggaagtttgaagaagcggtccgggctgccgaaggattccgggagctgttcggagacggccgtttttatttagggtaccagccgtttaaaggacatgagacgttatccgaagagatcctccgcctgtcagccgagacggaaattgctgtctgcgctgcgggggatgtccggtatatcaagaaagaagatcaagatgcgtaccgctgtctgtgcgctattaaagccggagagaagtgggaggatcagagcgggaatctgccggacttatacttgagggcgcctgaagaaatggcagagctttacacgcggcatccggaagcgattgaagcagccgcgcgtatcgcccggcaatgccgggtcgatgtcagcctcggacagacacagcttccgtcttttccggcgccggacggcaaatcagccgatgactatttggcggagatctgtcatgaggggctgcgcctccgtttcggcactcctgatgagcgcgctgtccgccggcttgaatatgagctggacgtcatcaggcgtatgaaattcagtgattattttctcatcgtatgggactttatgaagtacgcgcatgaaaagggcattgtgacaggcccgggaagggggtccgcggcaggctcgcttgtcgcttactcccttttcattaccgacgtggatccgcttaaacattctctgctgtttgagagatttcttaatcccgagcggatcagcatgccggatattgatatcgatttccctgatacgagaagggatgaggtcattcagtatgtacaaaataagtacggggccatgcacgtcgcccagattatcaccttcgggacattggccgcaaaggcggcgttaagggataccgggagagtgttcggaatcagcccgaaagaagccgaccagcttgcccgcctgattccgtcaaaaccgggaatgacgcttgatgaagcgaggcggcagtccgctcagctgaacaggcggctgtccgaatccgccgttcttcataaagtgtttcagatcgcaaggaaaattgaaggtcttccgcggcacacgtcaacacacgcggccggggtcgttctcagtaaagagccgctttctgaagttgtccctcttcaagaagggcatgacggcgtgtatttaacgcagtatgcgatggatcacttggaagatctcggtcttttaaaaatggactttttaggtttgcgcaaccttacgcttattgaatccattaaaacgatgattgaaaaagagacgaatacgaaaattgatttttccgagatttcttatcaggatgaaaaaacgttctcactattgtcaaacggtgatacgacgggtattttccagctggaatcatcaggaatgagaaacgtgctgaaacgcctgaagccgtcaagactggaagacattgtcgcggttaacgcgctttacaggccgggaccgatggaaaatattcctttatttatcgaccggaagcacgggcgggcgcgtgtggaagtgccgcacgaggacgtacgaaatattctcagtgacacttacggcgtcatcgtctatcaagaacagataatgatgatcgcctcgcgcatggcagggttttcattaggtgaagcggatctgctcagacgggctgtcagcaaaaagcaaaaggacattctggacagagagcgaagccattttgttgaagggtgcttaaaaaaggagtattctgtagtcactgcaaacgaggtctacgatctgattgtaaaattcgctaactacggattcaacagaagccatgctgtcgcatacagcatgatcggctatcagctcgcctatttaaaagcgcattatccgttatattttatgtgcgggctgttgacgagcgtcatcggcaatgaggacaaaatatcgcaatatctgcatgaagcgaaggggagcgggattcaagtccttccgccgtcaataaacaaaagcggttttccgtttgcgccggaaaacggagccgtcagatacagtttgcgggccgttaaaaacgtaggcgtctcggcagtgaaagatatttataaagcaagaacacataaaccgttcgaggatcttttcgatttttgctttcgcgtacctgcaaaaagcgtgaatcggaaagctatcgaagcccttatattttctggcgccatggacgaattcaatcaaaatcgcgccgccttgctggcctccgttgatgtggctttagagcacgctgaactgtttcgtgcagacgatgaccaaatgggattgtttttggaagaatcgttctccattaagccaaaatatgtagaggctgaggaatttccgctcgtggacaagcttcggttcgaaaaagaagctctcggtgtttatttctcaagccatcctttatccgctttcagggatctcctgaaaaaacggggggcgcaagcgatcacagcagcgcggcagatgccgaaggggcagctgtcaatcggcgctttgctcgcgggcatcaaaacgattcggacaaagacaggtcagcatatggcgtttctcacattaagcgatgaaacgggagaaatggaagccgtcgtgtttcctgatcaatatagaaggctgtctccgctgttaaaggaaggcgcgcttttattcgccgccggaaaaatggaagagcgtcaggagaagacacaattcatcatgtcatccgcctctcttcttgatcagacggaggcagacagagcgccgtctgtttacatcaaaatcgaaggcagccggcacaatcaggagtttttggaaaagatgaagcgtattttactggagcataaaggggaaaccggcgtttatctttattatgaaaaagacaagcagacgatcaggctgccggatacttttcatattcaggcggaccatcaggtgttataccgtttaaaagagctgctgggccgcgaaaacgtcgtgttaaaatagtggtaacaataatcgttttgttatacaattgaaacaattgtgctatcttatttaaagattctgaaatttttcacctccagcgcttgtaccagtctatgcggcagaatatgtaacaaagtacttaaaaggagtgtttagaatgtcattaagagaagaagcgttacatttacacaaagtaaatcaaggaaagctggaatcaaaagcaaaggtagaagtcagaaatgcagatgacttaagccttgcctactctcccggagtagctgagccttgtaaagagatttatgacgataaaaacaaagtatatgattatacaatgaaggggaacatggtagcagtcgtaacagacggatcagccgttctcggtctcggtaatatcgggcctgaagcttcacttccggtcatggaagggaaagcggtgctgttcaaaagtttcgcgggcgtggatgcattcccgatcgcgcttgacacaaacgatgtggacaaaatcattgacactgtaaagctgcttgcaccgacattcggcggtgtcaaccttgaagatattgcggcgccgaactgcttcattatcgaagagcgcctgaaaaaagaaacaaacatcccggttttccacgatgatcagcacggcactgccatcgtaaccgttgccggacttgtaaacgcgctgaaattatcaggaaaatccatgtcatccattaaagttgtggcaaacggagcgggagcggcaggcatcgcgatcatcaagcttctttaccatttcggcgtacgcaacatcgtaatgtgcgactctaaaggggcgatttacgaagggcgtccggccggcatgaacgcagtgaaaaacgaagtggcgaagtttacaaaccaagaccgcaacgacggttcgctgcaggatgtcattaaagatgcagacgtctttatcggcgtatcagtcgaaggcgcgctgacgaaagaaatggtggagagcatggcgaaagatccgattatcttcgcaatggccaacccgaatccggaaatcatgcctgaagacgcgcgcgcagccggcgcaagcgtaatcggaacaggccgttctgatttcccgaaccaggtgaacaatgttctggcattccctggaattttccgcggggcgcttgacgttcgcgcgactcacatcaacgaagaaatgaaaattgctgcggttgaagcgattgcttcccttgtttcagaggaagaattaagcgctgattatgtcatcccggctccatttgacaaacgtgtggctcctgccgttgcgaaagctgttgcgaaagcagcgatggaaacgggcgtcgccagaattacggtcgatcctgaagaagtggctgaaaaaacaagacagcttacggtcatcggcgaataataacacaaaaatgaaatggcagcgcgttggaaaaaaacaacgcgctgctgttcaatatacggactgctgaaatttttttaagggcaggtcttaaaaaaaattcagcagaatccttatttcttttgaaaacgctgacagataaggctgaacaacgctttttacggtatgaaatccgtccgtttccgtctgttttgaagcaaaaaatgtcgaatggaggatgacaccgtttgacaaaaaaagtacaatagtttcggtaaagttattattaagtctatctaatcggaagacatgcagtgaagagaacccttcacaaaagggaggtaatcatttgttaaaggatatattcacaaaaaagaaaaaatatgcttccgtgccgtctgagcaggcaaaacatgatgttccggaaggcattatgacaaagtgccccaaatgtaaaaaaatcatgctcacaaaagagttagataaaaacctgcgcgtctgcatgaactgcgggcaccatttcccgatgaatgcaaagcagcgcattgaaagcctcctggatgaagattcattcgaagaattcaaccagggaatgatatctgaaaacccgctcggtttcccggaatacttagaaaaaatcgaaaaagaccgtgagaaaacatcgctgaatgaagcggtggttaccggaaaaggaaccatcagcggattcccggccgtgatcgcgatcatggattcaacattccgaatgggcagcatgggttcggttgtcggcgaaaaaatcacgcttgcaattgaaaaagcaaaagaggaaaaagtcccgtttatcatctttaccgcttccggcggcgcacgtatgcaggagggggtcttaagtcttatgcaaatggcaaagacaagctctgcattaaaactgttcagtgaggagcagggactgattatttctgtcatgacccacccgacgacaggcggcgtatcggccagtttcgcgtctctcggtgattataatttcgctgaaccgggcgccttgatcggatttgccggaagacgtattattgaacagacgatcggggaaaaactgccggaagatttccagacggcggaatttttattaaagcacggccagcttgatgcggtgattcaccgaaacgacatgaaagacaaactcgcatttctgctggacatgcaccaaacaggaggtgagcatgagtggctgcaagattagaatttgaaaaaccggtgattgaactgcagacgaaaatcgccgaactgaaaaaattcacccaagattcggagatggatttaagcgctgaaatcgcaagacttgaagaccggctcagcaagctccaggatgagatttataaaaacctgaagccgtgggacagagtgcagatcgcacgccttcccgaccggccgacgacgcttgattacattcaatacctgtttaccgacttttttgagtgccacggagacagaacatacggagatgatgcggcgattgtcggcggagtcgccaaatatcacggcatgccggtcaccgtcatcggacatcagcgcggaaaagacacgaaagaaaaccttgtccgcaatttcgggatgcctcaccctgagggctaccgcaaagcgcttcgtctcatgaagcaggcggataagttcaaccgcccgattatctgcttcatcgacacgaagggagcgtacccgggtaaagcggcggaggagcggggacaaagtgaagccatcgccaagaacctgttcgagatggccggcctgacagtgcctgtcgtttgtatcgtcatcggggaaggcggcagcggaggcgcgcttgcgttaggtgtgggcaaccgcatgctgatgcttgagaactcgacgtattccgttatttctcctgaaggagctgcatccattttgtggaaggactccgaccttgcgaaaaaagcggccgaatccatgaagattactgcgcccgatttattagaattaggaattattgatgatatgattaaagaagtgaagggcggagctcaccatggtattaagcagcaggcgggctacattgacggtattcttaaagaaacgttaaaatctcttcttcaattgaacgccgaagaattgatctcacagcgctatgaaaaatataaagcaattgggaaagtttcggttgaggatcaatatatcggggtaaactgaatagacgtgaagcctatggctcacgtttattttttgtgatttttgtgatattccttaaattttatttaaaaacaatttatttaattgtataataggtaaggtttcatgggagctcaggcgtcccttttcattgttttagggcaatgatcatgatatgtttaacatatatatgttgctgaggtgaataggaaatgaagcgtataggagttttaacgagcggcggggattccccgggtatgaacgctgcggtgcgcgcggttgtgcggaaagctatctaccacgacgtcgaagtgtacggaatttataacggttattcaggattaatcagcggtaaaatagagaaactggagcttggttcggtcggtgacatcatccaccgcggcggaacaaagctgtatacggccagatgtcctgaattcaaaacagttgaaggccgtgaaaaaggaatcgaaaatttaaagaaactcggcattgaaggtcttgtcgtcatcggcggagacggttcatacatgggtgcgaaaaaattaacggaacacgggtttccgtgtgtgggtgtaccgggtacgatagataatgacatcccgggaactgattttacgatcggatttgatacggcgttaaacaccgtaattgatgcgattgataaaatccgtgacaccgctacgtctcatgagcgtacatacgttattgaagtgatggggcgccatgcgggcgacattgctttatgggcaggtcttgcaggcggagcggaatcaattttaattcctgaagcggactacgatatgcaggaaattatcggccgtttgaagagagggcacgaccgcggcaaaaaacacagtatcatcatcgttgcagaaggggtaggcagcggggttgaattcggaaaacgcatcgaagaagaaacgaaccttgaaacacgggtatccgttttaggacacatccagcgcggcggatctccaagcgcttctgaccgggttcttgcaagccgcctcggcgcttacgcggttgagcttctgcttaaaggaaaaggcggacgctgcgtaggtatacaaaacaacaagcttgtagaccatgatattatagaaattttagaatcaaaacatactgttgaaccaaacatgtatcagctttcaaaagaactgtctatttaaggcggaagaagctgaagatttcagaaggaagtgaacgagttgaaaaaaacaaaaatcgtttgtacaatcggtccggccagtgaaagtgtagaaatgctgacaaaattgatggaagcgggtatgaacgttgctcgtctgaatttttcacacggtgatttcgaagagcacggcgcaagaatcaaaaacatcagagaagcaagcaaaaagctcggcaaaaacgtggggattctcctcgatacaaaaggtccggaaatccgcacgcacgatatggaaaacggcgcgcttgagcttcaggcgggaaatgaaattatcgtttctacgaaacaggtgctgggaacgcttgaaaaattctcagtttcttatgaaggcctggcagacgacgtgtcagcagggtctatcatcctgttggatgacggtttaatcggattggaagtgctagaatcaaatccggaaaaacacgaaatcaaaacaaaaatcttaaacagcggcacgctgaaaaataaaaaaggcgtaaacgttcccggcgtcagcgtcaaccttcccggaattactgaaaaagacgccaaagacatcgtattcggtatcgagcaaggcgttgatttcatcgctgcgtcatttgtacgccgttctacggatgtcctggaaatccgcgaactgcttgaagagcataacgcgtctgacattcaaatcattcctaagatcgagaaccaggaaggcgtggacaacctggacgcgatcctggaagtatctgacggcttaatggtagcgcgcggagacctcggcgtagagattccggccgaagaagtgccgctcgtgcaaaaagaaatgatcaaaaaatgcaacgcgctcggcaaaccggttattactgcgacacaaatgcttgacagcatgcagcgcaaccctcgtccgacacgcgctgaagcaagtgacgttgccaacgccattttcgacggcacagacgctatcatgctttccggtgagacggctgcgggacaatatcctgtcgaggcggttcaaacaatgtttaacatcgccacacgcacggaagaatctctgaactacaaagaaattctgtctaaacgcagagatcaggtcggcatgacgattaccgatgcgatcggccaatcagttgcgcacacggcgatcaatctgagtgcggcagctatcgttacgcctacagaaagcggccatacggcgcgtatgatcgcgaaataccgtccgcaggctccgattgtagccgttacggttaatgagtctgtgtcacgcaaactcggccttgtattcggtgtattcccgtcaagcggccaaaacgcgaattcaaccgatgaaatgcttgaagacgcggttcaaaaatcacttgacagcggcatcgtgaaacgcggtgatctgattgtcattacagcaggttctgtcggtgaatcaggcacgacgaatctgatgaaagtccacactgtcggcagcattatcgcgaaaggccaaggcatcgggcgcaaatctgcattcggtccggtcgttgttgcaaaaaatgcgaaagaagctgaacaaaaaatgacagacggcgcagtattggttgcttcaagcactgaccgcgacatgatcgcttcacttgaaaaagcatcagcgcttatcactgaagaaggcggtctgacaagccatgcagccgttgtcggtttaagcttgggcattccggttatcgtcggtctggagaacgcaacttcagttttaacagaaggacaggttatcacagttgacgctgcccgcggcgctgtgtatgaaggccgcgcaagcgttctttaaacagctttaaaaaagagaggggggttctcccttctcttttgtctttaggctgattttcctattcccatgcgggcggtgacgcgcttttagaagggcaggagggcagaaaaatgagagtattattcttactgtttatcgtatgtccggcaattgaaatcggtttgtttctgctggcgggaaaatggctcggtatttttccgaccttccttctcatcattttgacaggcgtgttaggcgccttggtggcaaaaagacagggaaccgatgtgtatcatcgggtgatgcgcgatctgcagcacggcaaaatgccgggggaagcgcttcttgacggaatatgcgtctttttcggaggcctgcttttgatgcttccgggttttctgtccgatattgcaggggcctgtcttctgtttccgttcactcggaaccgcatgaagccgcttttgttcaaatggctgagaggaatgtcaaaaaacaagcggatcattatcaaataaaaacggcagccttcttacagggctgctgtttttatttggactgaacagtaatataggcccatatttcttttaaagcgcccgttgtgataaaggcctgaatgaaaacgagcagcgcgggccccgcagccagtcctaaaattccgaacaatttaaagccggcaaacagagcgattaaggtcgcaagcggatcaagtccgattgacttgcttaaaattttcggctccgtcagctggcgctggataagaaccacaatatataaaacaccgagaccgatcgcttgaggaagctgaccggcaatggccaaatacataatccagggaacaaagaccgacccggcgccgagatacgggagaaggtccaccaggccgataaaaaaggcgatggttgccgcatgctcaatccctaatagaaaaagtccgataaagacaatgatcatcgtgaaaagtatgagcacggcctgcgccttaatgaaacctgccatcgcttttttcagctctcccgatacggccttggcgtttgccgaaacccgttccggaaaaatggaataaagcagcgccttcagcttatgccagtcctttgtcataaaaaaagtcgccagcattgcgaaaatgaagacggcagctgtattgggaaggaaggcaatccatttcggcaccagctccaaaagatgtgaaagcatcagccccgcatttttagctgctgtatcaccgagggtctgaatatgcgtcacgatggatgcctgctgattggtttccagtcctttaaataggacggtcagctcgtggtacaatggctgaatgcgggaagtgaacagctcttcgcaatacgtcataaaggcgctgatatgaggagggagcgttttggccagataggcggttcccgaaatgatttccgcaacgagaaatgtcgccgccccaagaagaataagcaaaaagaagaccaggacaatgacagtattgactgaccggggcagccccgtcagtttgtccagccagtcaacaacgggaatgatcgctgatgacagaataagggcgatcagaaacggataagttaacggaaatgaggcgtaaccggccgctaaagcgccgccggccgcagcgagtacaaacagcgcgcggaaaaaaacagttgcatagtgcggattcacatcgatcctcctctcggtcggcacgtcctattacattagtttattcgtcaaaaaaaaggatatgaatacagatatgatgaaagaaggtgctttcaggatgtttacacaggcgaatttatttttactattattgctggccatcgcattggtagccaaaaatcagtcattgctttttgccgtcggctttctcattgtgataaaagctgtcggtcttgatcagaaactatttccggttattcagtcaaaaggcatcaactggggagtcaccgtcattacaatcgccgttttagtgccgattgccacaggcgatatcggttttaaacagctcggagaagcgatgaaatcatattatgcgtggatcgctctcggtgccgggatcgcggttgccttaatcgccaaaaacggtctcaccttattggaaaacgaccctcatattacaacggcgctggtcatcggcacgatacttgccgtcgcgcttttcggaggcgtcgccgtcggcccgttaatcggcgccggaatcgcctacttggccatgcaaatcgttaaaatgttcacttcgtaaagtaaaaaagcggcgtaaagctgcttttttttgtggagaaaattagagtttgcaccttcgcattttatagttcagacaaatgccatttgcattattccgatgaatgaagcggcttaccatgtaacaaagaacttcgggattgacggcgcacatggagcgaaaacagcgatggcagtaattccaatgatgaatggatgaaaagctgatgggatttatgggcctgataccaaagcaaaacttgaagtgttgttaaaataagcggagaccctctttccttcaatttgaaagtttgttagatttataatgagaatgaaaaaacacaattcggttggtagtccggatgcatgatttaaaatgtcagtaaccttcccctcctcgggatgtccatcattcttcagtaaatttaggaggagggaatcgttatgaaattaacggtttactacgatggtcagttttgggtaggagtcattgaagttgtgaatgacgggaaattaagagcaattcgtcatttgtttggacaagagccaaaggattcagaaataatgcattttgttaataatcaacttttacagactctctcccacactgaacaagaaggggtttgtgttaaagcaaaatctaagaaattaaacccaaaaagattgcagcgacaagcttctaaagagatgaaaaatatcgggatatcaactaaggcacaaaaagcgataaaacaggagcttgaagcaagaaaagaaaagaaaaaacaactgaatagaaaacaaagagaaaaaataaaggaacaaaaatatttaatcagaaaacaaaaagcaaaagaaaagcataggggaaaatagttggagagcccgatgaagcccttcgattgaaaagttgagcggcatcagttagtttcttcggactgatttagagaaaaagaagtataagtcagagcccttctcgaaatgaggagggtttttccgccatttatttaaaatcacttacatcagtaaatgagtcagtttcaattgatgaacggtttgatgaggatatttacagcccgaaaacagcgcaaatgcagtcaaacgattccagtccatgtgcggggagccaactaaaaccaagacctggatttctgaagctgatccgaacattgattcagtcgagtaaacaaaataacccccttctccggtaaagaagggggttaaatttgcggtgaagttgtcgcgcctgtccttttaaagtctcctccgaaactcccccaaatgaaaacatgagaatacatggttttacaaagcgcctgaaagcaaacgattaaatttatcaacgccaagccttgatatatagggcttttaaaacatttttagttaaaagtctacaaattaatcagattattgtttataataagaataggcttaaacttaaataagcttataagaatttgttatgttcctctataagcatatcggttatgtaaccgcaaccagtgaaatgtaagcattttcttgaaggggaaagggagtgtttgcatgactcattttaagtaagccgtatgttttatatactctttaaaggggaattttgattgaaaaggagaggttgaatatgacagcaacacgcggtcttgaaggggttgtagcaacaacatcatctgtaagctctattatcgacgatacccttacatatgtagggtacgatattgacgacttgacagagaatgcaagttttgaagaaatcatttatttgctgtggcatctgcgcctgccgaataaaacggaacttgctgaactgaaaaaacagcttgcgaaagaagctgccgttccacaagaaatcattgagcacttcaaatcctatcccctcaataacgtacatccaatggctgcgctccggacggcgatttcattactcggtctgactgacagtgaagccgatgtcatgaatccggaagcgaactacagaaaagccatccgtctgcaggcgaaagtgccgggcattgtcgccgctttctcaagaatccgcaaaggacttgatcctgttgaaccgaaggaagagtatggaatcgcggagaacttcctttacaccttaaacggtgaagagccttctccgattgaagtggaagcgtttaacaaagcgctcattcttcatgcggatcatgagctgaatgcatcaacatttacggcgagagtatgtgtcgccaccttatctgatatttactcaggcatcactgccgccatcggcgctttaaaaggaccgcttcacggcggagccaatgaagccgtcatgaaaatgctgacagaaatcggcgaagtggaaaacgccgagccttatatccgcagcaaaatggagaaaaaggaaaaagtaatgggcttcggacaccgtgtgtataagcatggagacccgcgcgccaaacacttaaaagaaatgagcaaacgcctgacgaatctgacgggtgaaagcaaatggtacgagatgtcaatccgtgtcgaagaaatcgtaacgtcggagaaaaaactcccgcctaacgttgatttctattccgcatctgtataccacagtctcggcattgatcacgatctgttcacgccgatctttgcgatcagcagaatgtcaggatggatcgcccatattcttgaacagtacgataacaaccgcctcatccgcccgcgcgctgattacacgggtccggataagcagacttttgttccgattgatgaaagagcctgatcaaacgggaggctggtgattttcatgtcgttagcctcttgttaatcaagcccggattggtttacaattttgatagaatcttgagaaaagtcattttattttctatacaagaaaaataaaatgttttctaaatatgaattacatactgggaggtaatattgtgtcacaaggtgaaaaaattacagtctctaatggagtattaaacgtaccaaataatccgattatcccgtttattgaaggtgacggcacaggccctgatatttggaacgccgcttctaaagtattggaagccgctgttgaaaaagcatataaaggcgagaaaaaaatcacgtggaaagaagtttatgccggtgaaaaggcttataataaaacaggtgagtggcttcctgccgaaacgctggaagacatcagagagtacttcatcgccatcaaaggtcctctgacgacaccggtcggcggcggtatccgttctctgaacgtggcgctgagacaggagcttgatttgtttacatgcctgcgtcctgtcagatatttcacgggagtgccttctccggtcaaacgacctgaagatacggatatggtcattttccgcgagaatacggaagatatttacgccggaattgagtatgcgaaaggttctgaagaggttgaaaagctgatcagcttcctgcaaaatgaaatgggtgttaacaaaatccgtttccctgaaacgtcaggaatcggcatcaaacctgtttctgaagaaggcacaagccgcttagtcagagctgccattgagtatgcgatcgaaaacggccgtaagtctgtcacgcttgtccacaaaggaaacatcatgaagttcactgaaggggcatttaaaaactggggctacgagcttgccgaaagagaatacggagataaagtattcacttgggctgaatatgaccgcattgtcgaaaaagacggaaaagaagcggctgataaagcgcagagcgacgcggaagcggcagggaaaatcatcgtcaaagacagcatcgctgatattttccttcagcagatcttaacccgtccgagcgaattcgacgtcgtggcgacaatgaacttaaacggagactatatctctgatgcgcttgccgctcaggtaggcggaatcggaatcgcgccgggagcgaacatcaactatgaaacagggcatgcgattttcgaagcgactcacggaacggctcctaaatatgccggccttgacaaagtcaacccgtcatccgtcatcctttcaggagtgcttcttcttgaacacctgaactggaatgaggctgctgacttgatcattaaatctatggaaaaaacgattgcttcaaaagtagtaacgtacgattttgctagattaatggacggtgcaactgaagtgaaatgttcagagtttggtgaagagctaatcaaaaacatggactgaacctaaagcagacttctaatgaagccaaaaaaggagaagagaatcatgggaaaaacacgcagtaaagtttctgttatcggagcaggatttacgggagcgacaacagcctttcttacagctcaaaaagagcttgcagacgttgtgctcgttgatattccgcaattagaaaacccgacaaaaggaaaagcgctagacatgctcgaagcaagtccggttcaaggatttgacgcgaaaatcacaggcacgtccaactacgaggacacagccggttctgatatcgtcgtcatcacagccggaattgcgagaaaaccgggcatgagccgtgatgatctcgtatctacaaacgaaaaaatcatgagaagcgtcacacgtgagatcgtgaaatattctcctgactgcattatcgttgtattgacaaaccctgttgatgcgatgacatatgcggtgtacaaagaatcaggcttcccgaaagaacgcgtcatcggacaatccggagtgcttgacactgcgcgattcagaacattcgtcgctgaagaattaaacctgtctgtaaaagatgtgaccggttttgttcttggcggacacggtgacgacatggttcctctcgtccgttattcctatgcgggcggcattccgcttgaaacgcttatcccgaaagaccgtcttgatgcgattgtagaacgcacaagaaaaggcggcggggaaatcgtcaaccttctcggcaacggaagcgcctactacgcgcctgctgcatcactgactgaaatggtagaagccattttgaaagatcagcgccgcgtgcttccgactatcgcttacttagaaggcgaatacggtcatgaaggcatttacttaggcgtaccgacgattatcggaggaaacggcctagagcaaatcatcgagcttgaactgacagactatgaaaaagcgcagctgagtaaatcagttgaatctgtcaaaaacgtgatgaaagtattgtcataagaaaaaagggaaggcttccgaatcagaagccttcctctttttacaattaatgaaagcgttttcttttccctgagcgatcctttctctgaaaatgatcaaaaaggcgaattgtctgaacgggcagtattggataaaatgaaatcataaagtgatatgcagcacataaaatagagaaaattggatgtcggggaaaatagacagcggagggcgcagcatgaacaaaaaaattttagttgtagatgatgaacaatctatcgttactcttttacagtataatctggaacggtccggctatgatgtcatcaccgcatcagacggcgaagaggctctggagcaggcagagaatgaaaatccggatttaatcgtactggatgtcatgctgccgaaagtggacggaatcgacgtctgtaaacagctcagacagcagaaaatgatggttccgatcttgatgctgacagcaaaagatgaggagtttgataaggtgctgggactggagctcggagcggatgattacatgacaaagccgttcagtccgcgggaagtcactgcgcgggtgaaagccattttaagaagggctgacatttcttcgctgtcacaaggcagagaagaggaaaaggacgggcagatcctcatcggcgagctgaaaattcttccggagcattacgaagcgtactttaagtcagaacagctggaactgacgcctaaagaatttgaactgcttctgtatttgggaaaacataagggaagagtgctgacgagagatcttctgctgagcgcggtctggaactatgattttgccggggatacccggattgttgacgttcatatcagccatctgcgcgacaaaatcgaatcaaataccaaaaaacccatctatattaaaacaatcagaggtttggggtataaactggaggagccaaaaatgaatgaataaagtccgtgtgcgtctgttcgctttactcgttgtatgtatcatattggttttcagtgttctcggcctttttttacagcagcttatttcttcatccgctgaagaaagaacggcggatcagctgaaaaaggaatcggtatacatagcgggccttcttgacaccggccgaatcggcaataaaagcaatgaaacggtaatccgtgatgccggccgcaccctcggtataaacgtcgccgtgctcaacgagaagggtgacgccgtatatcattccggcagtcatgctgatgattcagccgtaaaggagttcatttctcacaataaaagtgaggaagccgtacagtcgaaaagcaaagtcatccgcggcactgccgtaaaaaatgacgccgggaaaattgcggggtatgtacttgtttcctctgagatcaacggcggttcaagcgttaccggagaaatgtggggcatgctggcagcaagtctttgtaccgcttttatcattatcgttttcttttatacaaacatgacgtcccgttacaaaaaatccatcgacgccgcgacaaaggtggcgacggagctgtccaaagggaattatgacgcccgctcctacagcggttacgcaaggcggtcggaccgtctcgggcgtgcgatgaacagcctggcggtcgatttaatggaaatgacgagaacgcaggatatgcagcgcgatcgtctgttaaccgtcattgaaaatatcggatccggtttgattttaatagacgggcgaggttttatcaatctcgtgaaccggtcatacacgaagcagtttcatacaaagcctgaacgtctgcttcggcgcctttaccatgatgcgtttgaacatgaggagatcattcggcttgtcgaagacatttttatgacggagacgaaaaaatgccagctgctcagacttcccatcaatattgagcggcgctactttgaagttgacggcgttccgatcatgggccctgacgatgaatggaagggcatcgtcctcgtctttcacgatatgacggaaattaaaaaattggagcagatgagaaaggacttcgtcgccaatgtctcccatgaactgaaaacaccgatcacctcgattaaaggatttacggaaacactgttagacggagcgatgaaagacgaaaaggcgctttcagactttctgtctatcattctgaaagaaagtgagcggctccaatctctcgtgcaggatttactggatttatccaagatggagcagcaaaactttacgatgcgcgtagagtcctttgacgccgcaaaaattctgcatgaaattgaggcgcttttgcagcataaggctgcggaaaaaggcatcagctttcagctcgatctcccggaagagccgatttttgtgacgggtgatgcgcacaggctgaagcaggtatttttgaatctggcgaacaatgccctgacctacacgcctgaaaaagggacggtggggatttcggtacatgtgaaagaaaccgttgtcgatatcaaagtgtccgatacgggaatcggcattcagaaggaagagatcccgcggatatttgagagattctaccgcgtggataaagacagaagccgcaactcgggaggaaccgggctcggcctcgccatcgtgaagcacttaatagaagcccatgaaggtaaaatcgaggtcacaagcgagccgggacaggggactgtatttaccgtgacgctgaagcggcagccggaagcgtgatcagctttacaaaggattaacaatttcttcatgacctgttaaacctatcttgttaggatgtaacagaaccccttcatccaaggagccaattttgacggcgggaacgtattttcttgttcccgtccttttttgcgttttcacggggttcgctcattttcctttcaaattgaactttgttaaaataagagaagctgtgagattaaaaaatagaggaatgacgagcttttgctcttaggaggatattgaatgacggaacgaaaaaaattagtgcttgtcgacggaaacagtctggcgtaccgggcgttttttgcattgccgcttttaagcaatgaaaaaggcatccatacaaatgccgtatacgggtttgcgatgattttaatgaaaatgctggaagatgaaaagccgacccacatgctggtggcttttgatgcgggaaaaaccactttccgccacagcacgtttaaagaatataaaggcggaagacaaaaaacgccgccggagctttcagaacagatgccgttcatccgcgagctccttgatgcctacaaaatcagccgctacgagcttcctgaatatgaagcggacgatattatcggcacccttgccgtttctgctgaaaaagaaggcttcgaagtaaaggtagtttcgggggacaaggacttaacccagcttgcaaccgggaaaacgaccgttgccattacgagaaaaggcattactgacgtggaagattacacgccggagcacgtgcaagaaaagtacggtctgacccctttgcaaatcattgatatgaagggattaatgggagattcatccgataacataccgggcgtccccggcgtcggagaaaaaaccgcgattaagcttttaaagcagttccattcggttgagaaactgcttgattccattgatgaagtcagcggaaaaaaattaaaagaaaagcttgaagaatataaggaacaagccctgatgagcaaagagctggcgacgattatgacaaatgcgccgattgaagtcaagcccgaagatttagattaccaagggtttgaccgtgaacaagttgttgccatttttaaagacctcggttttaatacgcttcttgagcggctcggtgaagaaagcggcgaaacggcggaagaaaattttgaagacatcaatgttgaaacggcagaagaaatcaccgaagatatgctcgtttcgccgtccgctttggtcgttgaacaaatcggtgataactatcacgaagaaccgatcctcggcttttccatcgtgaatgaaacaggtctttattatattccgaaagaaatcgccattcagtctgaagcttttaaatcttgggctgaagatgaatcgatgaaaaagtgggtgttcgacagcaaacgttccgtcgtcgctttgcgctggcagggaattgagctgaagggaacggaatttgacgcgcttcttgctgcctacattataaacccgggcaattcgtacgacgatgtcgcgagcgtagcgaaagaatacgggctgaatatcgtttcaaaagatgaagcggtatacggaaaaggcgcaaagcgcgccgttccggctgaaaaagagcttgccgatcatctcgcgcggaaagcgtctgccgttaacagcctccgtgacaaactgcttgacgctttggaagaaaataatcagcttgaattatatgaagatctcgaactcccgcttgcgctaattctcggagaaatggaatcaatgggcgtcaaagtggatgttgaaagactgaagcgaatgggcgaagagcttaaggcgaagctgaaagaatatgaagaaaaaatccatgacatcgccggtgagccgtttaacatcaattcaccaaaacagctcggcgtcattctgtttgaaaagctcggcctgccgccagtaaagaaaacaaaaacaggctattccacttcagctgatgtgcttgagaagctcgcagacaaacatgatatcgtcgcgcacattctgcaatacagacaaatcggcaaactccaatcgacttatattgaagggctgctgaaagtcacgcgcaaggattctcataaagtgcatacacgattcaatcaggcattgactcaaaccggacgcctcagctcaacggatccgaacctgcaaaatattccgatccggctggaggaagggcggaaaatccgtcaggctttcgtaccgtccgaaccggactggcttattttcgccgccgattattcacaaattgaattaagggtgcttgcgcatatttcaaaagatgaaaatctgatcgaagcgtttacgaatgacatggacattcacacaaaaaccgccatggacgtgtttcatgtcagtgaagatgaaatgacacaagcgatgcgccgccaggcaaaggccgtcaatttcggtattgtttacggcatcagtgattacgggctgtcacaaaacctcggcatcacccggaaagaagcgggcgcttttatagaccgctatttggagagcttcccgggcgttaaggcatatatggaagagtcggtgcaggaagcgaagcaaaaaggatatgtcacgacacttatgcagcgccgccgctacattcctgagctgaccagccgcaacttcaacctgcggagctttgcggaacggacggccatgaatacgccgattcagggaagcgccgccgatattattaaaaaagccatgattgacatggcagctgagctgaaagaaaaaaacctgaaggcgcgactgctgcttcaggtgcacgatgaattgatttttgaagcgcctaaggaagaaattgaaatattagagaagctggttcctgaagtgatggagcatgctttggcattagacgtgccgctgaaggcggattatgcttcagggccgtcttggtacgatgcaaaataaacagagaaaaaggaagtgatgattgtgccggaattaccagaagttgaaacggtccggcgcactctgaccggtcttgtgaaggggaaaacgattgaatcggcggatatcagatggccgaatatcatcaaaaaacccgccgagccggaggaattcgcgcggcagattgcaggagaaacaatccgatccatcggaagaaggggaaagtttttgcttttccatctggatcattatgtcatggtgtcccacctgcggatggaggggaaatacggtcttcatcaggccgatgagcctgacgataaacatgtgcacgtcgtgtttcacatgacggacggaacacagctccgctaccgggatgtccggaaattcggcacgatgcatttgtttgcgccgggagaggaacagaatgcattaccgctttcacagctcgggcccgaacccgatgatgaagcatttaccgctgcttatttaaaagagcggcttgcaaaaacgaaccgcgcggtgaaaaccgccctgctcgaccaaaaagcggtcgtcggcctcggcaatatttatgtcgatgaagctttattccgggcgcgtattcatcctgagacaaaagcgaacagtctgtcagacgggcagataaaaacgcttcatacagaaattaaagacacccttcaggaagcgattgacgcgggcgggagcaccgtccggtcttatatcaattctcaaggggaaatcggaatgtttcagctcaaacattacgtatacggcaaaaaggatgaaccgtgcaaaacgtgcggcacgatgatttctaaaatcgtggtcggcggaaggggtacgcatttttgcgcccgctgccaaaaaaaatcatgaactgaagcggttcaagcaggcggcagcagaatgacttttttctaacacagttgatgacctttctccatatatatattgtgattcacccaataggcatatgtcacaattgccgatcaagagaaagggagaaacggatatggagattgtttctttgctgcttttggcttttgctgtcagcttggacagtttttcagtcgggtttacgtatggtttgagaaaaatgaaaatcccgttcaaagcgattgccgtgatcgcttgctgttcagcctctgtgatgtttatatccatgctgatcggccattttctgacaaagatttttcccgtatccgtcacggaaaaactgggcgggctgatcttaatcggaatcggggcatgggtcatctggcaatttttcaaaccggataaagagccggattacttattgcatgaaaaaacgttacttaatcttgaagtgaaatcgctcggcatcgtcattcatattttgaaaaaaccgaccagcgccgatattgatcaatccggaaccattaacggagtcgaggcgcttctgctcggtatcgccttatccattgacgcgtttggcgccgggctgggagcggccattctcggcttttctccggttatgatgagcgtgactgtcgggctgatgagctcgctgtttgtttcactcggcataaacgcggggcatttgctttcaagatggaattggatagataaaatgacatttttgccgggagtcctgctgattatcatcgggatttggaaaatgtaagaaggagtgggctttttgagcttggtcatcggtttaacgggaggcatcgcaagcggcaaaagcacggtagcgcgtatgctgatcgacaaaaaaataacagtcattgatgcggatgtcatcgcaaaacaggcggtagaaaaaggaatgccggcttacggacaaattgtggaggcattcggaaaagacatcctgctggaaaatggcggtattgacagaaaaaaactcggttctatcgttttcactgacgaacagaagcgtctgaagctgaatcagatcgttcatccggcagtacgtgcggaaatgctgaaacagcgggatgaagccgttgcgcgaaaagagcagttcgtcgttttggatataccgcttttgtatgaaagcgggcttgattatcttgtcggcaaggtgctcgtcgtcaccgtaccggcagacattcagcttaaacggctgatagagcggaattcccttacagaagaagaagcgatgagccggataacgtcgcaaatgcctttagcggataaaacaaaaaaagctgacgccgtcattgataacagcggcagtcttgaatatacaaagcaccagcttgaggaagtattgagcggctgggcataaacaaacaccgttcggaaagccgaacggtgtttttctggttaaaaatcaaaattgtcaggatcaggaccgacacggagattttcgttcagatcatcaatccgcttcatatcgtcagctgacagttcgaaatcaaagacatttgcattttcttcaatacggtgttttttcgttgatttcggaatggtgatgacaccgttctgcaaatcccagcgcaaaatcacttgagcggctgatttgccgtacttctcagcgatttcctgtaagacggtgtgatcaagcagctgaccttgcatcaatggcgaccacgcttcaagctgaatgccttgttcagtgcagaaagcaagcagttctttctgtgtcagacgaggatggtactccacctggttgatcatcggcttgatttcggtctctttcatgagatgtttcagatggtgaatttggaaattgctgaccccgatcgccttaatgcgtccatcccggtagagggtttcgagcgcccgccacgcatcgatgtactttccttcgacaggccaatggatcaaatataaatccaaataatctaaaccgagtttttctaagcttgtgtcaaacgcttttaacgtttcttcatatcctaaatcggcattccatacttttgacgtgacaaaaatgtcttcacgttttaatcccgcttcttgcagcccttggcggatgccttcgccgacaccttcttcatttccgtaaatcgaggcggtatcaacgctgcgatagccgtgcaccaatgccgttttcaccgcgttgacgagttccgcgccttcctctactttgaaaactccaatgccgaaccaaggcatctctactccgttatgcaatgttgcttttgcttgtaaatgtgttgtcatgtatatattcctcctattagttgtctgttgaaacaatcaaaatgcgctgaagaaaaactcacctcctttcaagggcagtgcgatcccgcttttcaagcttcctgctccatccggttaatacgaccgcgctgagcaccatcagcgccccgatccaagcggtatgaatgactccgattgagtctgtaatgattccgccggcaaacgagccgatcgcgattccggcattaaatgccgcgatatttaaggctgatgctgtatcaacggcgtttggcgcaaaacgttcactcagcatcacaacatatacctgaagccccggcacattcataaacgccaacagccccatgaaaataatggtgatcagcccggctgttttaaacggcgcggtaaaagtcagaacaaacagcacagcagcctggacaatgaacatataaaacaaggctttcagcggatttcggtttgataaacggccgccaatcatgtttccgatggcaatcgcaattccgtaaatgagcaggatggccgcgacggtttctttctgaaaaccggttacctcctgaagaagcggagataaatacgtaaacacgacaaacgttccgccgtagcctaacgcggtaatgataaataaaagcaataaccggccgtttgtgacgagtttgacctgctcggcaaatgcggttttcgtccctttgcgcaaatgtgacggaacgagaagcgcgtttgtgaggaatgcgatgattcctaccgccacaatgacggcaaatgcaatcctccatccgaattgctggccgagataggtgccgaacggaacaccggtcaccgtagccaccgtcagccccgtaaacataatggaaatcgcgcttgctcttttatgctccggcacgatattggcggcgattgttgccccgattgacatgaaaatgccgtgggaaaaagccgaaataacccgtgccgccagtaagacgccgattgaggaagcgctcgctgcgagtgtatttccggcaataaaaattaacatcacccagagcagcagcgttttccgcgacatgccggatgtgagagacgttaaaaccggcgcgccgaatgtcacgcccagagcatacatggaaacggtaagtcccgccgttgtcacaggtatatgcagatcttgagatataagcggcagcagcccgacgctgataaattcggttgtgccgatcgcaaaagcgctgacggctaatgccagcagcgctggtaaatagctttggcgatgtgaagacatctgttttcctccttgaacgataatgtatggttgaaatgatgccgggtaaacgatataagtataagagtacattccttttcagccggcaaatgtcattatgatcgatagaagtgtcattgaaaagaacgtacttttaagtgccataggcactttttagttcctatagatgaggaggaattaccgttgctgaagaaaaaatacaatatatccgtagaggcggcgcttgaagtgatcggcggaaaatggaagtgtgtgatcctctgccacctcatgcgcgggaaaaaacggacaagcgaattgaagcggcttatgccggacatcacccagaagatgctgacacagcaattgcgagagctggaagctgacggcgtcatcaaccggatcgtatacaatcaggtgccgccgaaagtggaatacgagctgagtgaatacgggcacagtctggaaagaattttaaatgcgctgtgcgactggggcgcgatgcatattgctaaacggtacggcgaggtgtcttccgttttagaggacagcattttaaatgacaaatttaaagaaccgggacaaatataagaaaaaagcaggcagcctgagacgctgatcctgctttttttatggaagaaagatcattttatatgcaaaaaaaccgattgaacaacatattgatcggtataagggtggatttttatcaagttgtactggcggatttcttttaatgtgttatactatatataaataaaggtaaattagagtggcatattaaaaaggggtgacctgagcatgaaggtaaaagtagcaatcaacgggtttggaagaatcggaagaatggtgttcagaaaagcaatggaagatgatcaaattcaaataacagccattaatgcaagctatcccccggaaacgcttgctcatttgataaagtatgacacaattcacggcaaatacgatcaagaagttgagacctccgacgacagcctgatcgtcaacggaaaacatattatgctgttcaatcgccgggacccgagagagcttccgtggaaagaatgcggaatagacatcgtcgtagaggcaacggggaaatttaattcaaaagaaaaagcaatgagccatattgaagcaggggcgacaaaagttattttaacggctccgggcaaaaatgaagacgttaccattgtcatgggagtaaatgaagagcagttcaatcccgatgaacatgtcattatttcaaatgcatcctgcacgacaaactgtcttgcgccggtcgtcaaagtgcttgatcaggaattcgggattgaaagcggcctgatgacgactgttcacgcttacacgaatgatcaaaaaaatatcgacaatccgcataaagatctgcggagggcgagagcgtgcggagaatccatcattccgacttctacaggcgccgccaaagcgctgtcgctcgtgctgcctcatttgaaaggaaaacttcacggtctcgctttgcgtgttcccgttccgaatgtgtcattagtggaccttgtctgcgatctgaaaacagatgtgtcggccgagcaagtgaatgccgctttccaaagagccgcaaaaacgtcgatgtacggaattcttgattattcggatgagccgctcgtttcttcggattataatacgaattcacactctgcgatcatcgacggactgacaacgatggtgatggaagaccgaaaagtaaaggtactcgcctggtatgacaatgaatggggatattcctgccgggtcgttgatcttatccgtcatgtcgccgcgcgaatgaaacacccgtcagctgtgtagactaaagatcatggacatttgttagaaaaaaacccttaacggcatattcgcaaaaaacacaccttgcaaaataaacttaaacacagtatactatctttcgtgaacttcttgctcgtgactgcttcggaattacttaaagggttaggacctctccggactaactttcccccgtggtaaatggccgggtcagttctcggaaattcacttttttaattcttgttaaggggggtccatgattatggaaacaatggggcgtcacgtcatctccgagctgtggggatgcgattttgataagctcaatgacatggattttattgaaaaaacgtttgtaaatgctgctttgaaatcaggagctgaagtgcgcgaggtcgcatttcacaaatttgcaccgcaaggcgtaagcggagtcgttattatctctgagtcacatttaacgattcacagttttcctgaacacggatatgcaagcattgatgtttatacttgtggagacctggatcctaatgtggctgcggattacattgcggacgcattacatgcagatacaagagaaaacattgaaataccgagaggaatggggcctgtacagattaaacaggcacaagcgaaagtactgtaattttcaaaacgcaaacacaagggagctaagctgaaaaagccattacgcgctttgaagctgatgctccttttctaatgtaaaaaaacagcattgctttttctttaagcattttttttgtaaaatagaaaagataaggccggtctatcggctctcccaacaaataggctcatcctagaaacgttggcgggcatttaccggaagcttgcgaaccgcattacagcaacgaaacagatgggagctgatccaatttgaaatgtccttcatgccagcacaacggttcccgcgtacttgattcacggcctgcggacgaagggaaatcaatccgcagaaggcgggaatgcgaagcctgccattaccgcttcactacatttgagaagtttgaagagatgcctctgatcgtcgtgaaaaaagaaggcgtccgggaagaattcagccgtgaaaaaatgctgcgcgggttaattaaagcttgtgaaaaaaggcccgttcctttaaaaacattggaagacatgtgctttgacattgaaaaagagctgagaaaccaaggtgtatctgaagtcaaaagcgaacttgtcggagaaatggtaatggaccgtctggcgaaaatcgatgaggtgtcttatgtccgctttgcctccgtctaccggcagtttaaggatataaacgtgtttatcgatgaattgaaagatttaataaagaaagaacgctgagagagctaagagattgtgtctggctcttttctcatgagcaaaattggcatttgatagatcgcagaaacggtgtaaaatgagagtagaaacatatcggaaggtttgagaatcatggctgactattggaatgacgtattgcctgtagatccttatacggtcaaaagccgttcgcttcttcaggatgtcgacagacaggttttgacacatctgtaccagccgctgatcggttcttttgcattctccctttatatgaccttatggggggagcttgagcaaaaccgcttgtggggagcggaatccacgcacaggcagctgatgggcatgatgcagtcaaatttaaaaaagattcatcatgaacaggggaagcttgaaggaatcggactgctgaaagtgtatatccgggagtccgagcaaaaagagcggatgtttatttatgagctgctgcccccgctcagaccgaatgatttttttgaagacggcatgctgaatgtctttctttataacagagtcggtaaaacgaaataccagcagctgagacaattttacacgcacccttccgtcggcgcggacgcaagggaaattacccgtccgtttaatcacgcttttgcctcttttcagccgagtgaatggaaaatgacgcctgatatggaagaggcgatgaagctccccgaggactatgagacggcgtctgtcggacaagcgccttcctatacggtgacggaggaagtatttgattttgagcttttcatggcgggactgtcagaaacgatgataccgcgtaaatcaatcacgcaggacgtgcgggagagcattaaaaagctttcatatttatacggaatagatcctatctccatgcagcacgtcgtcatgaccgcaattaatgaacaggatacgataacggccgaagcgctgaggaaagcggccagcgactggtaccaaattgaaagaagcggtaagcttccggaactgattgataaaacacagcctgtcaccttgagagaaaaccggacggaaaaggacgattcattgaacggcgaactcatcgcccagcttgagaccatatcaccgagaaagcttcttcaggacattgcggacgggaccgagccgtcaaaagccgacttgcagattatcgccgatattatgttcgaacaaaagcttgagcccggcgtcaccaatgtgctgatttattatgtcatgctgaaaacggatatgaagctgtccaaaaactatatccaaaaaatcgccgcccactgggccagaaaaaaagtcaaaacggtacgggaagcaatgaagctcgcaatagaagagcacaggcaatatcttgattgggcggacggcaaaacaaacggcgcggcgcgcggcaaaaaaaccgtccgggaagaaaagcgccctgattggatgaaagaagaagaaaccgggaagaaacaagaacagccggctctttccgcgcaggatcttgaagaacagaagaaaaaaatgatggaagaaatgaaaaaactgaaaaaatactctgcctattgagacagagaagcggggtgatattgaatggaaccgatcagccgatccttagaaggcgtgacgaaaagacctgactttcaaaaacgcctggaacgaatgcagcagcaagtcatggccgacgaagacgtccaggcttttttgaaggaacagaaagatgtaatcaatcaaagcatgattgacagagggttaaataaactgtacgaattcgttcagcaaagcaaacagtgcgccttctgttcgaaagacagccggacgaacagcctgcttgaaggctatcatccgaagcttgtgatcaacgggcgttccatcgatattgaatattacgaatgtccggaaaagagaaagctcgaccgccagaaaaggcaaaagtccctgatgaagagcatgtatatccagcaggatcttctcggcgcgacgtttcagcagatcgacattaccgatccgagcagagtcggcattttccagcatgtgacggattttctgaagagttataatgaaacaggaaaaggcaaagggctgtatctgtacggaaaattcggaatcggaaagacatttattttagccgccattgctaacgaactggcggaaaaagagtattcatcaatgatcgtatatgttcccgaatttgtcagagagctgaaaaactcgctccaggatcagtcgttggaggcgaaactgaatatggtgaaaacgacgcccgtattgatgcttgatgacatcggagcggagtcaatgacaagctgggtcagagatgaggtcatcggcaccgtgcttcagcacagaatgagccagcagcttcccactttcttctcgtctaatttctcacctgacgagctgaagcatcattttacgtattcacagcggggagaaaaggaagaagtaaaagcggcaagactgatggagcggattttatatttggcttcgcccgtccgtcttgacggggaaaaccgccgccgttcatgatgccggcgtccaatgggaaggatttgagggaatgaggaataagaaggctgtcacttgggctgcggctgcggcgggagcgggccttttgctgtgggcaaaccgcaaatatctgaatctgtcgcctaaggagatccggctgtgggtattatcgttcggtgtttttgcgccgcttgtgtttatcggaatttccatcgtcaggccttttgtgctgtttcccgtatcaatcgtttccgtcgccggaggattggcgttcggcccgtttttcggcaccgtgtatacgctggcgggctcaatgggcgctgccgccgcgtctttttttgcggcggggctgtttgcctttaatgagaaaagccgccatggaaaaatggaagtcattcaaaagcagatgaaaaccaatggcttcttttatatttttatcctgcgtattctgcctgttaactttgatgtgatcagctatgccgcgggcctatcgaaagtcaggccgatgacgtattttttggcgaccgcagcgggtatcattccggggacgatcgtcctgaatgtgctcggcgcgagctttatgtccggcaatgtgctgaccgtactcggcgtgatctgtctttacatcgtatttttatcgcttcccgttatatttaaaaagaaggtgcgccatttgttcggcggtgaaagctaacctttacgtctattttaaaaacatcccccatatacttgtaacagatgccgtaaggggggacaaatatgcttgaagtgatctttgaagatgaccacgataccgccgcttttttacatctcattcagcaatcggacgaccggagacattttattgtccgtgaaggcataaaaaaagtcggaatcgcaaggtctgaaacggctttttgcgttcagcgctttattgagccgatacttgtcaggttttttttggaatgcaaagaagacgagcatatgctttcgcttattgaggacgcatactgcttcaccgatcaggatgaacagcagcaaatccttcagcttgcacacagcattatggaaggagagcttgatgatcatccgttcgagccgaagaaagagccgcgcacacagtttatttcagatgcgctccggacgatttcacttgatgcgggtgttttttccgtgcgttcgtttcagacgttccggctcggcaggtattatgagcggctcagagaatacgcggaggctgcgatagatgaatatcggatggaacaggaatatcaaaactttatccagtctctgagagattatgtgacatccaatccgccgcggatgaagaaagtccgcatcgtacatgaccgggcttttacgctgtgggagctgcgctatttgtcagaacgggaacagaaaaaatacatagacagacggtttgtgcgggagcacccgatgtatatagattcccatctccttgcgccgctgatctccattgcgcctgagacggtagaactgtatacggacaaaccggagcatatgatgtccagaacgattcaaaacgtgtttcaggagagggtgcgcctttttccgctgggcgcgtttgcagccgagaagacggaaggatagccgcacggacggccttgtgtaagcggcagggctgtctttgcgaaatcagacggaaaaccgagttgcatttttctcgcagacattttataatacataaaagattaatgattgctacacgtattgataaggacatgaagcattgataccggctttataagagaggagagcccaggctgaaagctttccagctatggatcattgtctttaccgcctttgaacttcagctgtgaacgccggaagaagcgccagtaatagctgacgggaactcccgttacagagcttagagccgcaggtgccgaagcaatcggccgcgcggaaaaaagggtggaaccacgattccgtttatttaacctcgtccctttcatagggggcggggtttttgatttgcataaaaaaaggagtgacgaagatgtcagatatgatcaacatcacatttccggacggagcggtaaaggaatttccgaaaggaacaacaacagaagatatcgcggcatccatcagtccgggattaaagaaaaagtctttagccggaaaactgaacggacaggaaattgatttaagaacgccgattcaagaggacggtgcggtagaaatcattacagaaggcacagaagaaggtttgaacatcatgcggcacagcacggcgcatttattggcccaggcgattaaacgcatttataaagatgtgaaattcggagtcggccccgtcattgaaaacgggttctattatgacgttgaaatggaacaggcgctgacgccggatgaccttccgaagattgaaaaagaaatgaaacggatcatcggtgaaaatctgccgatcatccgaaaagaagtgagccgtgatgaagcaaaagccatgtttgcggaaatcggcgataatctgaagcttgaactgctggatgcgattccagaagacgaaacggtctccatttatgagcagggcgaattttttgacctgtgccgcggcgtgcacgtgccgtctacaggcaaaattaaagaatttaagctgctgagccttgcgggcgcatactggcgcggcgacagcaaaaaccaaatgcttcagcgcatttacggcacggccttctttaaaaaggatgacttgaaagagcatttgcgcatgcttgaagaagcgaaagagcgcgaccaccgaaaactgggcaaagaattaaaattgtttgccaactctcaaaaagtcggacaaggtctgccgctctggctgccgaaaggcgcgaccatccgccgcgtgatcgagcgctacattgtggataaagagctgagcctcggttatgagcacgtctatacgcctgttctcggaagcaaagacctgtacgaaacatcgggccattgggatcattatcaggatacgatgttcccgccgatggaaatggacaatgaaacactcgtgctccgtccgatgaactgtcctcaccatatgatgatttacaagcaggacattcacagctaccgcgagcttccgatccggattgcagagctgggaacgatgcaccgatacgaaatgtccggggcgctttcaggtcttcagcgcgtacgcggcatgacgttaaatgacgcgcacattttcgtccgccctgatcagattaaagaagaattcatccgcacggtccgtttgattcaagacgtatacgaagacttcggcctgaatgattacacattccgcctgtcttaccgcgatcctgaagacacggaaaaatattttgatgatgatgagatgtggaacaaagcgcaatccatgctgaaggcggcaatggatgagatggggcacgactattatgaagcggaaggcgaagcggcgttttacggccctaaacttgacgtgcaagtgaaaacggcgatcggcaaagaagagacattgtcaactgtacagcttgacttccttcttccggaacgctttgatctcacttacgtcggagaagacggcaaacagcaccgtcctgtcgttattcaccgcggcgtcgtgtcaacgatggagcgtttcgttgctttcttaatcgaagagcacaaaggcgcccttccgacatggcttgcgccggtgcaattccaagtcattcctgtatcaccgtccgtgcatcttgactatgcgaaaaaagtgcaggagcgcttgcagcgcgaaggcctgcgtgtcgagcttgacagccgggacgaaaaaatcggctataaaatccgtgaagcgcaaatgcaaaaaatcccgtacatgcttgtggtcggtgaccaagaagcggaaaacggcgcggtaaacgtccggaaatacggcgagcagaaatcagaaaccgtctcattggacgattttgtgaaaaaggctgtagccgaagcgaaaaaataaccggaaatacaaaaaccccgttcattcagaatggggtttttttgcgtataacattatctttctttttgtttctctataatcgcaaacagctcgtgaagatcgctgatcacgtaatcaggcgcaatgtccgtatcatttttcttttgcgtccggtttacccagactgtcgtaatgcctgcccgtttcgctcccaatatatcagtattgaggttatctccgaccataatggcgtcttcttttttcaggttcaggaggccgaggcaatgttcgaatatggaggcgtcgggtttcccttttccgaaagcgcctgagatgacgatttcattaaaataaggcgcaagctcaggaacgccggcgagtttttctttctgcaggctgggatcgccgtttgtcagcagaagcaattcataaacacctttcagcttatcaagcaccgcaaacgtttcatcatacacgtacggacgctgtctgcgttccgccgcgaaaaattccgctaaatattcgccgtaagccgcatcgtctataccgacgctttttaagccgttcgtccaggcgtttcgtctgtattccggggcaatccgattcagctgtttaaatccttcgctgaccggctcggaaaaattcgcccataatccttcaaatggattaatgccgatcatgaccgtataaggataggtttcgtatgacatatacaattcccgtgccgctttccgaaccgcatcttcaaatgtatgcgggtcaaggccatattttttttccgcttgtaaacatgtttccctgaatgttgttctgacgcttttttcatcccataacagtgtatcgtccaaatcaaaaaatacggctttcatgatcttctcctctttgttatattctgaaactctctgccgcaaggctcccgtttattctacaatagatatatagactgtgaaagatttgttttcagatgatttgaaaaaaacaggcaggtttgtgtcagattctgtctcaggctctaaaacgtgataaaataaaatttgaaagaacaggtgaaaagtatgctgcatttgatcatcatgatgctggaaagagtcggaattatcgtcatattgggatttgttctggctcataccagattgttcagacaggcgctccagcagcctgagagctataaaggcaaagcggtgctgatttcaattttctcgctgttcagtatcatcagcaactatacgggaatagaaattcagcggaatacaatcatgaataatgactgggtgtttcaaattaatccgtccggttcaattgccaatacaagaattatgggcgttgaaatcggcggactcttaggcggcccgtatgtggggatcggcgtcggcatactggccggcctgcatcgtttatcactcggcggcgcgaccgcagtcagctgtgccgtctcatccgttttagcgggcattttgtccggatggatcggacggtatttcagaaaacgctatgcgatgccgacaccgcgggtggccgcgcttgtcggactcggaatggaatcgctgcaaatgctgctcatcctcttgatggccaagccgttttctgatgcttggacgcttgtgagcatcatcggcatcccgatgatattggtaaacgggtcagggacttttatttttctttcgatcattcagtcgattatccggaaggaagaacgggcgagagcccttgaaacccacagggtgctgatgattgccgaccagacgcttccgtttttccgccaggggctgaatgaaagctcatgcaaaagcgtcgccgccatcattcacagtcaaacaggaacggacgcggtatcgcttacggataacgaaaagattttggcgcacgtcggcgcgggtgccgaccatcatattccgtctgaaagcctgatcaccggattgtcaaaacgcgtcattaaaacgggtcatattatgaaagcgacatcaaaggaagaaattgaatgcacgcacgatccctgtccgctgcatgcggcgatcgtattgccgttgacgtcaaacggcaaaacgatcgggacgttgaagatgtactttaaaagcccgtcaggtttaagccgggttgaagaagagcttgcagaaggactcgccatgctgttttccactcagcttgaactcggcgaggcggaactgcagagcaaattgctgaaagacgcagaaataaaggcgcttcaggcacaggtcaatccgcattttctgtttaatgcgatcaatacgatttctgctctttgccgtacggatgtggaaaaaacccgaaagcttctgctgcagctcagcgtctatttccgttccaatctgcagggggcaaggcagctgctcatcccgctttctaaagaactgaaccatctgcaggcgtatttatcattggagcaggcccgttttcccgggaaatataaaatcagtcttgaaatcgaacgcggtttggaggacatcgaaattcctccttttgtgctgcagattctcgtcgaaaatgcgctccgccatgcattttcaagaaagcaggacagctgtgccgtcaatgtcagcgtggtatccgccggtcaatcggttttaatgcgggttggagataacgggcggggaattgatccggaattgctgtccgtgctcggaaaccgtccgctgccgtctaaagaagggacgggaaccgcgctttacaatttaaatcagcggctgatcgggctgttcggccccaaagcagctctgcgattggaaagtgaggccggcaaaggtacggacgtatcatttgagctgcctttgaaactgatgactaaaggagaagaacatgctgaaggtgttaatcgttgatgatgaaatgctggcaagagatgaattagcttatttgctgaaacggacgaatgaagtaagtgacataaacgaagctgaaaatattgaatccgcttttgacagtatgatggatcaaaaaccggatctgctgtttttggacgttgatttgtcaggagaaaacggatttgacattgccaaacggctgaaaaacatgaaaaatccgccggccgtcgtttttgcgacggcgtatgaccaatttgctttaaaagcctttgaagtcgacgcgctcgattatttaacgaagccttttgatgaagaaagagtgcgccagacgatcagaaagtttaaaagagtgaagcgggacagggcaggagccgtctcagagcagccgtccgcagccggagcgcataaactggctgtatcagccggtgaatctattgtcattttagatacgaaggacattatttacgccggcatggaggacggacacgtttccgtcaaaacgtttgccgcgtcttattccgttcatgaaactttggcggtcattgagaaaaaactgcctgatacgggtttcttgagagtgcaccgcgcgttcatcgtgaatacggagcatattacggaaattcatccgtggtttaattcgacgtacaatcttatcttaaaagacggctctaaaattcccgtcagccgtacatacgccaaggacttaaaaaagctgcttcatattatatgaggcggcttttgcatttcagcagccgttttttgcatttcagaatgaatattcagccgtttgttatgaaagcgcttcaaaaggcgatttctcttttataatggacctaacaaagagaaagaggtgaagaaaatgagtgcgaaaaaagtgtacggatttctgacacaagcatttatttttgccgtaattatgctcatatctaatgggattgcagcgattgtccccattcctatacccgcttccgtagtaggtttggtgttattatttgtcctcttatgcctgaaagtgattaagcttgaacaagtagaaacgctgggaacatcattaacgtcactgatcggatttttatttgtcccgtccggcatctccgtgatgaattcacttggcgtcatgcagcagtacggcgtgcagatcgcactcgtcatcttactcgctaccatcattctgttaggggcgacgggccttttttctcagctgatcttgtctgtcagccaaaaacgtcagaaggcagcccctgaaaaacaaacggtgcgccgttccaatcaggaaaaagaacttgtgcagcattaggagggaaatcggatgagtccatatttcggtattgtcgtttcacttgcggcctttggcatcggcacgtatttatttaaaaaaacgagaggctttttcctcttcaccccgctgtttgtcgcgatggtgcttggaatcctttttctgaagctcggcggtttttcatatgaagattataaaagcgggggagacattattagattcttcctggagcccgcgacgatcgcttttgccatccctttatacaaacagcgtgacaaactgaaaaaatactggtggcagatcatgtcttctatcattgtcggctctatctgctcagttacgattgtctatttgatcgcaaaaggcattcatcttgacgcggccgttatgaaaagcatgcttccgcaggcggcgacaacggcaattgcccttccgctgtcaaaaggaatcggcggcatcaccgacatcaccgctttcgccgttatttttaacgccgttatcgtctatgctctgggcgctctattcttaaaactgtttaaagtaaagcacccgatctctaaaggactggctctcggcacatccggacacgcactcggtgttgcggtcggtattgagatgggggaagtagaagcggcaatggcaagtatcgcggttgtcgtcgtgggagtggtgacagtgctggtcattccggtattcgttcagctcatcggaggataaacccgggtcatagacccgggtttttttattgtgttggcacgtccgcgtgcggcaaagaacgaaatttcacatttttccttgcgctcgccccggcatcgtgttaaaatgaaaaagttgatccggagaagtcattcttgactaatgatccggtattgtgtagaatagttattgaattgaatataaatcacaagcagaggcacccgcttctcacctgattgacacattcatgtagttggcaggttgaccgtacatttttatttatgcagatgttcgtagtgtgggtgtgttgtcatgcccgcactttttgtttgcctgcagaatgcagtcaacaagcgttgtgaatcaattcgaagaaactatggaggtggctcattattagcaaagatcaattggttaatgagggtatccgtgcacgtgaagttcgtctgatcggacaaaatggcgatcagctcggcatcaagtcccgtcaggaagcacttgaaatcgccggccgcgcaaatcttgaccttgtgttagttgcagcaaatgcaaaaccgcctgtctgccgcatcatggactacggtaagttcagattcgagcagcagaaaaaggacaaagaagcacgcaaaaatcaaaaaatcattaacttaaaagaagttagattaagtccgacgatcgatgagcatgactttaacacgaaattgcgcaatgcgattaaattccttgaaaaaggcgataaagtgaaagcttctatccgctttaaagggcgcgcaatcactcataaagaaatcggccagcgcgtattggaccgtttctctgaagcatgtgcggaagttgcgacagtcgaaacaaaaccaaaaatggacggccgcagcatgttcttaatgctcgcgccgaaaaacgaaaagcaataaggaggaaatcccatgccaaaaatgaaaactcaccgcggatctgctaaacgttttaaaaagacaggttctgggaagttaaaacgttctcatgcatacacaagtcacttattcgccaacaaatcccaaaagcaaaagcgtaagcttcgcaagggtgctattgtgagcgcaggagacttcaaacgcattaaacaacagcttgccaacatcaagtaatcggacaaggaacaattaggagggaaatctaatgccaagagtaaaaggcggaactgttacacgtaagcgtcgtaaaaaggttcttaaattagcaaaaggttatttcggttcaaaacatacattatacaaagtagcaaaccagcaggtcatgaaatcaggaaactatgcattccgtgaccgccgtcagaaaaaacgtgatttccgtaagctttggatcactcgtatcaacgctgctgcacgtatgaacggtctttcttacagccgtttaatgcacggtcttaagctttcaggcatcgaagtaaaccgcaaaatgcttgctgatcttgctgtaaacgatcttactgctttcaatcagcttgctgatgctgctaaagctcagttagacaagtaagttgaaaaagccgctctctttccgggagcggtttttttacgtaaagggtgacaatcaatggctctcttcatttacgccgtattgataaacggatacggcttttggatcatgggcgctgataaaagaagagcaaaggcgcacaggtggagaatatcagagaaacgaatatggctcacagccgccatgttcggctcactcggcgtatggatcggcatgcgcaccttcaggcataagacgaaacacaaatcctttttatacggggtgccgctgctttttctcactgaagccgtccttgtgctgatgtatttgatgtataaaacataaaaaaagcaggagagcttatcgctcgcctgcttttttcgcttttttgatgggctggtcccaatcaatcttgcaattcgggtaccgctccaatacctttttttcgacttcttcaaaatcacctgcagaaaagcggttcagcttttccggattttcggtccatacaaaaatcgtatgaataaacagcggatgatctttggaagggatatgcttttctccttcaaagagcactcctttataagtaagctggagattttttcgcgtgtttttctgttcgtcaataaaataaaaattctcttttgattgcgccagtctgagccttcttttcgggtttgcgtaaaatttgacgcccatgtaaataaaataaataagaagtgcaagcaagacaatcctcaatactgtaatggccatatgtgtgaaggcacctcctcacctttgtcatgatctgatgtaatacgaaaaacaaaacaaaaggtttcatttttttaaaagaaatagataaaaacatttacccgtttttcaggcgaattaatcgtatgcttcagcattggttttgtataataagaagggtagtgaaaaaaaggaggtctattgatgacaaaattagatgaaacgctcaccatgctgaaagcgttaacggatgcaaaagggataccgggaaatgagagagaagtaagacaagtgatgaaatcatacatagaaccatttgccgatgatgtcacaacagaccggctgggaagcttaatcgccaaaaaaaccggcaaagaaaacggtccgaaaatcatgatctcagggcatttagacgaagtcggttttatggtgacacaaatcactgataaaggctttctccgctttcaaaccgtcggcggctggtggtctcaggtcatgctggcccagcgcgtcaccgtcgtgacaaaaaaaggggacatcacggggatcatcggttcgaaaccgcctcacattctgcctcctgacgccagaaaaaaagccgccgatattaaagagatgttcatcgatatcggggcgtccagccgtgaagaagcaatggaatggggcgttcttccgggtgaccagattgtgccgtattttgaatttacagtgatgaacaatgaaaaacatttattggcgaaggcatgggacaaccgtatcggctgcgcgattgccatcgatgtattaaaaaatctgaaaaacagcgatcatccgaatgaagtatatggggtcggaacggttcaggaagaagtcgggcttcgcggggcgaaaacagcggcacatacgatccagcctgatatcgcgttcggtgtggatgtcggaattgccggagatacaccgggaatttctgaaaaagaggcgcaaagcaaaatcggcgaagggccgcaaattattctgtatgacgcgtcaatggtatctcacaaagggctgcgcgaccttgtcgtgaacacggcggaagaagcgggaattccgtatcaattcgattccattgccggagggggcacggattcaggttccattcatttaaccgcaaacggagtgccggcgctgtccattacgatcgcgacgcgttacattcacactcatgccgctattttgcatcgggatgattatgagaatacggtaaaattgattacagaagtgattaaaaaattagaccgggaaacagttgaccgtattacttaccaataaagatacggaagaatctgcttttttaagtagattcttttttttgtctgtacaaatatgagccctgcgtctacaataagagaagacatagaaaaatctgacaacatgtttttgaaagcgctttaaaaaaggggagggtttacaaatgaaaaacagattcagacgcatgatccgcttttcgtgcgcagccgttacagccgggctgctgctgatgtcttcatctccggcatctgccgcgttttggggggcatcaaatgaattgcttcacgatccgacaatggcgaaggaaggaaacacgtggtacgctttcggaaccggtttggaaggggagagggggattcgcgtcttaaaggcgggcagcggcggcgtatggaccgttcagaaatcaatctttacttccccgctgtcatggtggggcaattatgtgccgaattacgggctgaatcaatgggcccccgatgttcaatattataacggaaagtattggctgtattatgccgtttcttcattcggcaaaaatacctccgcgatcggtcttgcatcatctgcaagcctcagttcgggaaactggaaggacgaagggctcgtcatccgttcaacaagcgccgataactacaatgcaattgatccggagctgacaattgataaagatggaaacccttggcttgccttcggttctttttggagcggcattaagctgacaaagcttgataaaaatacaatgaaaccgacgggatcactttattccatcgctgccagaccgaataacggcggagctttggaagcgccggccatcacctaccagaacggctactattacttaatggtgtcgtttgataaatgctgttcaggcgtgaatagtacgtacaaaatcgcttatggaagatccaaaagcatcaccggcccatatctcgataaaagcgggaaaagcatgtcagaaggcggagggacgattcttgactccggcaatgaccgctggaaaggcccgggcggtcaagacattgtgaacgggaatattttagtgcgtcatgcgtatgatgccgaaaacagcggaattccgaagatgctcatcaatgatatcgattggagttcaggctggccttcctattaattgatcagccgggcatgtgtgtccggcttttttacttgcaataaaagattgacagtttgattcctccttaactataataaaattgttcgtacaaataaaaggataaaagttttgttgtttatattcgtacgtatattttttaaaaatgcaagcgctttattttgatgggaaggggaaatgaatgtgcttcagaacaaagaatatgaattttggtttgtaacgggaagccagcacttatacggagaggaaacgctgcagcttgtcgataaacacgcaaagggaatatgtgacggcctcagcggggtgtcatcaagatacaagatcaggcataaaccggttgtcacgtcatctgaaacgatcagagaggttttgcgggaagcgcagtatcaagaaaactgtgccggggtcgtgacatggatgcatacattttcccctgcgaaaatgtggattgaaggtctttccgcttttcaaaagccgatgcttcatcttcatacccagtatcatcgcgacatcccgtgggaaacgattgatatggactttatgaacagcaaccaatccgctcacggagaccgggaatacgggtatatccagtcaagaatggggcagacgagaaaagtcatcgcaggctattgggatgatgaggaagtcaaacatgacatttcgcaatggatgaacactgctgccgcctggaatgaaagcaggaatattaaagtagcccggttcggcgacaatatgcggaatgtggcggttactgacggagacaaagtcggcgcccacatccaattcggctggcaggttgacgggtacggaatcggcgatcttaccgaggtgatgaacaacgtcaccgacggagaaattgaggcgctttatgaggaatacgacaaattgtatgtcatcagcgacgaaacaaaacgggatgaagcaaaagttgcttccattaaagaacaggcgaaaattgaactcggattaacggcctttctcgaacggggcggatatacagcgttttcgacctcgtttgaagttttgcacggaatgaagcagcttccgggtcttgccgttcagcgtctcatggaaaaagggtacggatttgccggcgaaggcgattggaaaacggctgcccttgtgcgaatgatgaaaataatggcggacggagaacaaacctccttcatggaagattatacgtaccattttgaaccggggcgtgcgatgattctcggatcacatatgcttgaagtatgtccgacgatcgcccttgatcagccgaaaatcgaagtccatcctctctcaatcggagggaaggaagatccggcccggttggtctttaacggaatcggcggttcagccatcatcgccagcatcattgatatcggcgggcgattccgtctcattctgaatgaagcggaaggcagggagattgatcatgatatgccgaatcttcctgtggcgcgggtgctgtggaagccggagccatcgctgaaaacagctgcggaagcatggattttggcgggaggcgcccatcatacttgtatgtccttccggcttacggctgaacagatgcttgactgggctgagatggcaggcattgaaagcatctttatttcccgcaataccgaaatacatgagctgaaaaaagagttgaaatggaatgacgtattataccggctgggagggaattgatatggcgtatacgattggtgttgatttcggcacattgtccggccgggcggtgcttgtcaatgtccgcacgggcgaagaaatcgcgtctgcggtaaaagaatacactcatgccgtcatcgaccgcacgctgccgaagacgggtgaaaaactccctcgggactgggcgcttcagcatcctgccgattatatcgaagttctggaaacagcgattccgaacctgcttcaagaggcgggcactgatccaaaagacgtgatcggcataggaattgattttaccgcctgcacgattttgccgatagacgtcgcggggcagccgctttgtatgctgccggaatttgaacgggagccccacagttatgtgaagctgtggaagcatcatgcggctcaaaaacatgcagaccgtttgaacacgattgccgaagacacaaaagaaacattccttaaaagatacggcggtaaaatttcttctgaatggatgatcccgaaaatcatgcaaatcgcggaagaagcgccgcatatatacaaggcggcagatcggattgtggaagcggcagactggatcgtctatcaattgtgcggttcattgaagcgaagcaactgcacggccggctacaaagcaatctggaatgaggagacggggtatccgccggatcattttttcgaaaggctcaacccgttaatgaaaacgattacaaaggataaattaagcggcaccatttattcagttggggaaaaggcaggaggtttgaccgaaaaaatggcggagctgaccgggcttctgccggggacggccgttgccgtcgccaatgtcgacgcccacgtgtcagtgcccgcggtcggtattacagagccggggaaaatgctgatgattatgggaacctctacctgccatgtgctgctcggcgaggaagaacatatcgtccccggtatgtgcggggtcgtcaataacggcatcttgcccggatatgcgggatatgaagcgggacagtcctgtgtcggcgaccactttgaatggttcgtcaaaacgtgcgttccgagagactatgagaaggaagctgaggataaacacatagacattcacgagctgctcagcaaaaaagcagctgaacttgttccgggggaaagcggccttctcgcgcttgactggtggaacggaaaccggtcaaccttggtggacgccgatttgacgggcatgatgctcggcatgacgctgcacacgaagccggaagaaatctacagggcattggttgaagcgacggcgttcggaacgaggatgattatcgaaacgtttcgggaaaacggcgttccggtcgaggagctttacgcagccggaggaatcgccgaaaaaaatccgtttgtcatgcagatttatgcagacgtcacaaatatggacattcaattatccgggtctccgcaggcgcctgcactcggctccgcgattttcggagcgctcgccgcgggacgggaaaacgggggtttctccaatattgctgaagcatgtgcgcatatggggaaattaaaagacggcttttatgccccgaaccgggaaagagttgagatttatgacagcttatatgctgaatataaagagctcgtacactacttcggcaaagaaaacaatgtcatgaaacgcctgaaagccattaaaaaccgtgattttgcgaaaggggggagccgccatgcttgaagcgttaaaagaagaagtcctcgccgccaatctgaagcttgaggaacataaccttgtcacgtttacatgggggaatgtcagcggcattgacagagagagcgggagaatcgtcattaaaccgagcggtgtcgattacagtgagctgaccgctgacaaactggtcgtcctgaatgaggacggagacattctcgaaggctcgctgaaaccgtcttctgacacgccgacccatctttatctgtataaagcgtttccggctatcggcggaatcgttcatacgcactcccgctgggcgacgagctgggctcagtccggaagagacatacccgctctcggaacgactcacgcggattactttgaaagcgctataccctgcacgagggaaatgtatgaagaagaaattgtgaaagattacgaatatcatacaggcaaagtcatagccgaaacctttcaaaacgaaccgtatgaacaaaacccgggtgtcctcgtccacagccacggcccgttctgctggggaacggacgcgctgaatgccctgcataacgccgttgtgctcgaaacggtagcggaaatggcctaccattcgcttatgctgaacaaacagctcagtccgatcgacagagtgctgcatgataagcatttttacagaaaacacggggcgaatgcttattatggccaaacttgacgcagccgggtttctgattgatttagacggaaccgtattcagggggcgggagctgattgacggcgcaaaagaagccgttcatacccttcagtcactgggcaaagccgttgtctttttaagtaaccgcggcaatctatcaagagcaatgtgccgaaagaaactgctgggtgccggtatccgcacggatgaacggagcatcgtgctgtcctccagtgtgacggcatcatttttaaagaagcattatcctttgtcaaaggcgtgggtgttaggggaaaaagggctgactgatgaactcgctttagcgggtgtcgccctggcgcaaaacccgcaggcggcagactggcttgtcatctccctgcatgaaaccgtcacctatgaggatctgaatctcgcttttaaggcggcttcctccggcgcgcgcatcatcgccacgaaccgggaccgctcctttccgaatgaaggcggccatgccatggacgtcgcgggaatgatcggggccattgaagcatccgccggagcaaaaacggagcttgtcatcggcaaaccgtcttggctgatggctgaggcggcatgtgaagcgctcggacttccccctgaggaatgcgccattatcggagacagcctcgaatcagatatcgcaatgggcagcctgtacgggatgaaaagcgtattggttctgacggggtcggccaaacttggggagccccgtctatatgaacctgacgtcgtccttgattctattaaagacctgacagaattagcgaaggagggaatcctttcatgaaacgttctcctgaggacattcaatccgagtttgacaaggaaggggccagccgctcaccgattcaaatagaagatatcgtgatcggggcgaatgcaaaagaagagcttctcagatttctgcaaaaaaaatgctggaatcatccggtcatcgtctgtgaccggaacacgtacgaggcggcggggcgtctgcttgcggacgaattgagggcaggcgggatcaaagcgtcaaaagtcattattccggagcatgaagccggggccgccgcggctgatgagaggacattggtctatacgctgatcaacctcgcggaagagacggatgtcatcattgcgtccggttcaggaacgattcacgacattacgcggtttgccgcctgccagcgcggattgccgtttatctcattccctaccgctccatcagtcgacggttttacgtcggcgggagcgccgctcatattaaacggaatcaaaacgacgattcaaacgaaagcgccgatcgccttatttgcggatacgaatgtattaaaagaagcgccccgttcaatgacagccgcgggcttcggagacatgctcggaaaaataacatcgctggcagattgggagatttcccgcaggcttgcgggtgagccgtactcagaagccggggcgaagcttgtgaaagacgcgctttggcagtgcattgatcaccgcgctgacattgccatgggaacggaggccggcattcagatactgatggaagcgctgatcgtttcgggtcttgtcatgcttgcgcttgaccactcccgccccgcctcaggaggagaacatcacatctcgcattggattgagatggaaatgctgaaggcaaaacagcctccgattctccacggtgcgaaggtcggctgtgcgtgcgcggtgctgagtgatatttacaaagaactggcttgtcacgaagagcttgctgaactgccgccgcactttcgcgaggcgattcaatctgcatatgaagggcttcccgacggcaagacaattgccgggtggctcgcatctgcgggaggtcccgcctgtttcgatgagatcggtgtaaaacaggaccttgtcagcgatgcgcttaagcatgcgcacacactgagagaccgttataccggtttaaccatcataaatgaaaatgcagcgctctttgcacatcatttgcatcaatagccgcacggcctaaagtggaaggggtaatgacatgaaaaaaacgaccgctgtatgtttggtgctgatgatgctcttcttgtttaccgccggctgttcacaagaacggacggccggccggccgggagaaacagagctgacgttttggacatttaacggtctgcacgaacagttttatcaggaaatggtcaaagaatggaatcagaaatatccggatcgcaaaatcaagctgaataccgttgtttatccttatggacaaatgcatgataatttatcggtttcgctgatcgcgggtgaggggcttcccgatatagccgacgtggaattaagccggttctcgaactttctgaaggggaaggatatcccgcttgccgatctgacgccgctgattgaaaaagaccgcgataagtttgtggaagcgcgtctggccttatacagcaaaaacggaaaattgtacggccttgatacacatgtggggacgaccgtcatgttttacaacatggatatcatgaaaaaagcgggcgttgatcccgcctccattaagacatgggaagattaccggcgggcagggaaaaaagtgcgtgaggccgctgggaaaccgatgggaacggttgaaacaaacgactccgccacattcctatccatgatttcgcagcaagggtcaggctactacagcaaaaacggaaaattgattctgaacagcaagacgaatacagacacactgaattatgtaaaggacatggtaaatgataaaacccttctgccggctcccggcggcggccatcacagcgaagaatactacggttttatgaatcagggcggggcagcctcagtgctgatgcccatttggtacatgggacggtttatcgattatatgcctgatttaaaaggaaaaatggcgatttaccctatgccggcctggaaagaaggcggtgacagatcagcgggtttaggcggaacagccaccgtcgtgccgaagcaggctgaacatctgaagctcgcgaaagaatttctcggttttgcgaaaggttcgaaggaagggaatataaagctttggacggtgctcggctttgacccgctccgctgggacgtgtgggattcaaaagaattgaaggagaaaaacaagtacacggatttcttccggaacggtacgtcaattttttcctcgctccttgaaataaaagatgagatcaatccgatttatctgcatgaagacttctctaaagcggctgatctcgttgtcagacaagtgctgttcgatgcgctgaagacgcaggaaaaaacacctaaggaagccttggacgaggcggcagagcaattagagaaataggagaagccgccctatttaacagtgaaagcgggggagcttttatgagacctgtaaagacagagacagcgcaaaccgtttctgcagtccggaagaagccgcgccggcgcaatgtgctgtattcaaaaaaagcggcgccttatctttttacggcgccatttatcatttcgtttctcgttttctttttgtatccgattatcagcgtgtttatcatgagctttcaacggatactgccgggagaaattacatttgtcgggttttccaattataccgctcttcttaatccaaccttttatacggcattatttaacacattggaatataccttctggacgctgattgtgctgattccggtgccgcttcttttggcggtgattctgaattcgaagctcgtcaggttcagaaatgtgtttaaatcggctctgtttgtaccggctttaacatcgacgatcgtagcggggattattttccgtctgatgttcggagaaatgaatacgtcgcttgcaaacgagctgatgatgaagcttggcgtatcaccccaaaactggctcaacaacaaaggcaccggcatgtttttaatggtgctgcttgcgtcatggaggtggatggggattaacattctttactttctggcgggattgcaaaacgtgccgaaagaattgtatgaagcggctgaaattgacggggcgagtacgtggaaaaagttccggcatattacccttccatttttaaagccggtgtccgtttatgtgttaacgatcagtattatcggcggtttcagaatgtttgaggaaagctatgtgctttggcagaataattccccgggcaatatcggcctcacgcttgtcggttatttatatcagcaggggcttgcatacaacgaaatggggtacggggccgcaatcggaattgtccttttgcttgtcatcttactagtcagtcttgtttcactgaaactgtccggttcgtttaaaggggagggataagcgttgcgtaacaatcacatgtcttccgtgtacagagttgcgtttaccttgttttttatcatgctgagcctgttgtatatctttccgatgatctgtctattgctcggttctttaaagccgtcatctgagctgatgcgtatcgggctgaatctgcgtcttgatccggatgtgatgagccttgataactacacctatttgttcaacggggggagcatttatttcaaatggttttttaacagcctgctgctcggcgttctcaccacggttctcacgctgtttttttcctctttgatcggctacggacttggtgtctacgaatttaaaggcagaaatattattttcgttcttgtgctgatcattatgatggtgcctcttgaagtgatgatgctcccgttgttcaaattgacggtgggtcttcatttgatcgattcttatactggggtgattctgccgtttattgtgtcgcctgtcgccgtgttctttttccggcaatatgcgctcggacttccgaaggatctgcttgattcagcgagaatggacggctgcaccgaattcggcatttttttcagaattatggcgccgctcatgaaaccggcattcggggcaatgatcattcttcaatctttaaacagctggaataactttttatggccgctgatcgtgcttcggtcgaaagaaatgtttacgcttccaatcggactttcagggctgctgagtccgtacggcaacaactatgacatgctgatttccgggtccgtttttgcgatactgccggtgatcatcatattcttgtttttccaaaaatacttcatttccggactcacagtaggcggagtgaagggatagagagagggaggaaatataatgaaaaaagcggggattacagcagataaagaatatatcatcggtgaagtggacaaacggatgtacggatcatttatagaacatatgggccgggcggtgtatgaaggcatttatgagcccggacacccgaaagccgacaaggacggcttcagaacagacgtgcaggagttaatcaaggaattgcaagtgccgttcatccgctatccgggagggaattttctctcgggctacaattgggaagacggcgtcgggccggtgaaggaccgcccgcggaggctagatttggcatggcagacgacagaaacgaacgaagtagggacgaatgaatttttaacgtgggcgaaaaaagtgaacgccgaagtgaatatggcggtcaatctcgggacgagagggatcgatgccgcccggaacctcgtcgaatactgcaaccatcctgaagggtcgtactggagcgacttacgaaaatcgcacggatatgaaaaaccttacggcatcaaaacatggtgcttaggaaatgagatggacggcccttggcagatcggtcataaaacggcgcatgaatacggacggctcgccgctgaaacggcaaaggtgatgaaatggacggacccgacgatcgaattggtggcttgcggaagctcaaacagcggcatgccgtccttcatcgagtgggaggccgaggtgcttgagcatacgtacgagcatgtggattacatctcactgcatacgtattacggcaatcatgaaaatgatcttgagaactatttggcgaagtcgatggatttagaccattttattaaatccgtcacagccgtatgtgattatatgaaagcgaaaaaacgcagcaaaaaaacgattcacctttctttagatgaatggaatgtgtggtatcactcaaatgaagcggataaaaaagtggagccatggattacggcccggccgatcctcgaagacatctacaattttgaagatgcgctgttgatcggttcactgctgattacgatgctgcagcatgcggacagactgaagatcgcctgtctcgcccagcttgtcaacgtgattgcgcctatcatgactgaaaagggcggagaagcatggagacagccgatcttttatccttacatgcacgcctctgtctacgggagagggacttcaatgaagctgctgattacctccccgaaatacgactcagcggactttacggatgtgccgtatgttgatgccgcggccgtttaccatgaagaggatgaagcactgaccatttttgccgtcaacaaaagcaaggaactgatggaaacggagataaagctgagagggtttgaagattaccgcattattgagcatatcgtgctggagcatcaggatatgaaagcgaccaatcaaaaaaacagaaaagaagtcattccgcactccaacggaacgtcttcggcaaatgctgaagggataacggctcattttactccgctgtcctggaatgtcatccgtttatcaggaaaataatgttccgaaaagccgggctgcgctgccggcttttttttacgcaaaaatcatctcctgttatctgataattgtgataatatttagaaaaagagaaaaggggctgggattaaatgaatgcgattacaatcgtcatagcgtctatatgtattttggcgatcgcctatcggctttacggtacctttatgatggtcaaagtattaaaaatcaatgatcagacaccgactccggcccatgtgcttgaggatgggaaagattatgtgccgacgaataagtgggtgtcattcggccaccacttcgcggcaatcgccgctgccggcccgcttgtcggaccgattctggcagctcagttcggctatctgcccgggcttttatggctgttaatcggggcggtgatcggaggagccgtgcacgatattgtcgtattgtttgcatcaatgcggaaaaacgggaaaacgctttctgaagtcgccaaagaagagctcggcccggtggcgggtttttgcacgggtctctcgatgctgtttatcattacgatcacgatggcgggactgtccatggttgtgctgcacgcgcttgagaaaaacccgtggggaacgtttgcggtggggattacgattccgatcgcgatgggggtcggcctctactataaaaaaacgggcaatctcaaactcgcatcaactgtcgggtttcttttgttaatggccggtgttgtaatcgggccgcagctgcagacaacggctttcggggacatgctgacactggatgcgaaaacgcttgcagtggcgcttcctgtctatgcgtttttcgccgcggcgcttccggtttggcttttgctggctcctcgtgactatttaagcagttttatgaaaatcggggtttttgccgctttgatcgcaggcgtctttttcgtcaatcccgccattaaatttccggccgtaacggagtttattcacggcggagggccggtgatcgcgggtcctgtctggccgtttatttcaataacgattgcctgcggtgccatttcgggctttcatgcatttgtcggttccggcacaacgccgaaaatgctggataaatggagtgatataaagccggttgctttcggagcgatgcttgtggaatgtctcgtcggaattatggcgctcattgcagctgccgctcttgagcccgccgactattttgctattaacagcacgcctgaaatattccgcaccctcggaatgaatgtcgtccatctgcctgaattgagtaaagaaatcgggctcagtctggaaggaagaacaggcggcgctgttacgcttgccgtcggaatgacgtatatctttacggagattccgtttttcagtcatttggcttcatacttttttcaattcgtcattatgtttgaagcggtgtttattttaacggcgattgatgcgggaacccgtgtcgcccggtatttgattcaagagtttttcggagaggtctataagccgctgaaaaaaacagactggctgccgggctcgattttctcaagcgcgctcgcctgcctgctgtggggctatcttctgtattcgggcgacatcagctccatttgggcgctgttcggcgtatccaatcagcttatggcgtctgtcggcttaattatcggtgcgaccgtcgtattaaaaatagcggataagcggcgctatatgctgacatgcctgattcctctcgcttatttgtacgtgaccgtcaactatgcgggttattggatggtgcggtatgtgtatttgaaccccgaagcggcgggatacaacgtgctgaatggcgttttatccattatcatgctcattctcgggcttgtgattatcattgcggctgtgaaaaaatgggcgaatgtatggcgtgatccgagtgccagactggaagcttcaatacccggataaatccgcggccgtccgaacattgcagcatcataaaaaaagcagagagccgatcggtctctctgctttcatcttatgacaaatccgccgcttccaaaaggtaatccgccaaatgaaccgcgcggacacggccagttaatccttcgcgtaaaatgccgagctgcatttgcagaaggcatccgggattggctgtcacgatgacggccgcctccgtttttccggcggctttcatcttactgtctaatattttcatagacatctctgactctgttatattataaatccccgccgacccgcagcagctgtcggccttttccatttctctgtactcagcccctttaatgcttttcaaaagcgtgcgcggttcctctgacgtatgcatcacattgcggagatggcaggagtcctgatatgtgacgatatgaggagactgcgcccgcaggtttttttgatggaacttcagatcaaccagtacggatgaaaagtctttgagcttccggacgaattgttcggcacgttccgcccatccaggttcatctttcagtaaatgcggatattcctgaagaaaggcgccgcatccgccggcgtttgtaatgatataatcagcgtcaagcgcttcaaaagccgcgatattccgcttggccagttcttttcccatctctttttctccgctgtgcccgtgaagcgcgccgcagcacgcctggccgtccggaaccgcgatttcacacccggccgcctgtaaaagcgccgttgtcgcatgatttgtcgctaaaaacatcgtatccattaagcagcccgagaaaaaagcggcccgtttttggacgggacccgcggcaggaagaaaacgcggccgttccttcatgtctttccgtttcgggacgggcgggagcacttgttccattgtgcgcagatgttcaggcaaaacgcgcagcataccggtttttctgacggcggtctgcagtcccgatctttggtatattccgagaagattcacggctgtctgcatgcggttttggtgagggaaaagcccggtgaaggcggctttccgcaagaggcgcacgcccggcttatgttttttattttgatgaatgatatccctcgcttcttcaagcagctgtccgtaattgacccctgccggacaaacgggctcgcatgcccggcatccgagacacagcgaaagtgagcgctcgacatcttcatccggctcgatcagtccgtctgtgacggctttcatcagggcgatccggccgcgcggcgaatgggattcttgaaatcccgattcgatataggtcggacaggaaggaaggcagaagccgcagcgcatacagttcagcaattcaccttcatccatgcggtttttgaattctgtttgaatgtgttgctgctctttagccgttgtcatttcatcaccaccacgcgtttccttgatgaattggcgaatatttttcccggattcagcagattttggggatcaagcgcttgtttgatcgctttcatggcggtgatgccttctgttttcagcttcatttctaaatacggcgcttttacgatgccgaccccgtgttcacccgttatcgtcccgcccagctcaatcgctttttcaaaaatggcggcaaaagctttttcgacacgttccatttcctctgtatttcggatatcggtggtgcacgtcggatggaggttgccgtctccggcatggccgaatgtgcagatggacaggccgtatgtttctgcaatctcgttaatggctttgaccatgctcgcaatttgtgatctcggcacggtcgcatcttccagaatcgttgtcggtttcagccgggcaagggctgataatgcggaccgtctggcctctgtaagcgcgaatgcctcttcctcggtttcagccgtttggacggatacggcggctccgtttttacaaatcgcttcgattttttccatatctcgtctgaccgtgtcgatgtcaccgtcctgttcgatcagcagcaccgcttttgcgtcggtcggaagcccgatcttggcgtaatcttcaatgacctgcagtgtcggctgatccagaaattcgagtgtcgccggaatgattttttcagcgatgatggcagaaaccgattccgcagccgcttcaatatgttcatagagtgcaagcagcgtttttttcgtttccggcttcggaaccagctttaaagtcgcttccgtcacaacgccgagcgtcccttctgatccgacgaaaagccgggtcagatcataaccggcgacatcctttgtcagctttcctcctgtgcggatgatatcgcctgaagccaatacggcttcaaggccgaggacataatcccgggtgacgccgtacttcaaaccgcgcagcccgccggaattttcattaatattcccgccgatcgtcgatattttcatgctgctcggatcaggcggataaaataaacctttttgttcaaccgcacggatcatatcttgcgtaatcacgcccggctggacggttgccgtcaaattttcttcatcgatttctagaatgcggttcataagtttgaataaaagcacaagcccgccttcagacggacatgtgccgccgcataggtttgtgcctgaacccctcggcacgatcggaatgtcatgcctgctgcaaatcgttaatatacgggacacgtcatccgcgctgcggggggcgattaccgcatccggcatggcttgcagctgaggagccgcatcataagaatacacaagacggcccgccgccgaatcatcataattctccttcccgaccgtccggatgaacgcttcttttgcctctcgtgaaatcatgttctcccaacctccctgataagaaaagcgttttcatttaattgtaaagaaaaacgattccgcacactatggagaaacatatgaaaaatgatgatatgattacgtgctttttgtatgttgatctaaaaagcgcagcgccaaataaaaagccgttatgtcttcggggcggtcaagcttcatatttgtcagtgattccagtttggaaagacggtagcgcaatgtattgatatgaatatgcatgtcgtcggcggtgcgctttaacgataattgccgatcgaaaaaggcgcgcagcgtatccagaagttcttcccggccgagtacatgctcgaaaacccgccgtgaaaattccgacctcgtgccaggtgcgatatcggcaagacacatatccagttttaaatcttcttcaaagacggcctgcttgtcaccgattccggctgaaagtgctttatccgcctgttcgtatgattccgtgaggcgctctcccggaacgatccgtccgatgccggcggtgacaggctgcccgaaaacggcgccgatctttttaatgagctgtgttttggaagccgaatttgcttcatgattaatgagaatgcgttcatttccccagcggacaaacaggtcttcagggcattcgtactgccagagccgcccgagctcctccgctttatattgctcataacggccttgaatgagtatgatccggcggtatgcgtgaaggtctgcgccgatgagctttgctttttctaaaaagcccggagaccattctttcagctgcagccaatcaaccataaaggattcaagcattctcgcacgccactgcgcttcttccatatggcgcgtttctttaataaacagctccgtcatttttctgagcaattctccgaaaggcaggatatcgtcagggtctcctgtcagaccgaatactccgatcacttcatggcctgaaaaaacggggaggttcagtcctgcttttacgccctcgagccgtttttcatcttctttcgtaatgatgacattccgtttttcgcgcgcgcagatcagtgcgccttcatgaaaccatccggcgcgcgcctcgttggtgcccgcgatgatcattccttttgtatcggcaataatcacttcgcggctgtacatatgtttgacttcggcaatcaatttctttgccagttccggctgtaactgcatggcgatccccctcgccattattatacaaaaaaaaccgggtgtcccatcacccggttcatgtttattgcgcaggttttaatccgccttcaagtgttttgagcatttcatttttttctgagtccgacgcatgctgccaaagaacttcgaataagacgccgaggcccggaagcattttttcttcaccgctttggatggcgtcaacgatagtatgctccagctgatcctggttattgccggttacattggcaataacggcgttgcgtaaattaagatccattacaaccgctcctttttctgaatgtgatacgcatattcttaccgcgcacgcggtttattatgtgctgttcttaagatataataacaacatgcatgaaaaaaggagagcacagacataaagtgaaacgaatcgactctgcaaaaaaccaaaaagtgaaggactggaaaaaacttcacacaaaaaaagagagacttaaaacgaatacatttctgatagaaggagagcatctggcagaagaagcgctcaaatcaaagggaacggtaaaagaaattctcgtaaacgatgagagcgccatcccggccgatctggacatgagcatcccgtgctacgtgctgagcgaagacgcgttttcagccgtgacggaaacagaaacgccgcagcggattgccgcggtctgccatatgccggataagcggcctgatcagctgaaacggctgcttctgattgatgccgtgcaggacccggggaatttaggaacaatgatcagaacggcagatgcagcggggatcgacgccgttgtccttggtgagggaacagcagacccgtacaatggaaaaacgctgcgttcagcacaaggatctcattttcatattcccattttgaaacgtccgcttgatgagttcaccgctgagctaaaatcacaaggcgtcgcgatctacggcacggcgcttgaaaacggggcggcttatcaaagcgtgaagcctgaagaatcgttcgcgttaatcgtcgggaacgagggggcgggagtggacgcaggccttctgcaaaaaaccgatctcaacctgtacgttccgctgtacggacaggcggaatcgctgaatgtggcggtagcggccgccatcctcgtttatcatctcagaggataggttgcgaaaagccttggatttcactataatagatagcaataatgtaaaaaccgtgacagaggacgtcaatttttgcacacactgccttccagggagaaaatgccgctgactgagagcatttttatcgcagcacaaaaattgattttcacctctcgagttgtcaccgggaccgtgccaaacgcgcgtaaaggtgaaccggaacgatcgtttccgttatgtcaatgaagctgtcggcagatgaagtctgccttaaaaagggtggtaccgcggccacaactcgtcccttctctcaaggggcgggtttttttgttttctgaaaaaggcatagaacggtttggtttacataaaaggaggatgcatgatggaagagaagcttaaacagctcgaactggaagctgcagaaaaagtagaagcggcgggttcattaaaagaagttaacgacattcgggtgcaatatctcggaaaaaaagggccgattacagaagttctccgcggcatgggcaaactgtccgccgaagagcgcccgaaaatgggagcgctcgccaatgaagtgagagagcgcattgcagcagccattacggcgaaaaatgaacagcttgaacaagaagagatgaataaaaaactcagcagccagacgattgacgtcacattgccgggcagtcaggtaaacatcggcggacgccatccgctgacggtcgttattgaagaaattgaagatttatttatcggaatgggatataccgtcgaagaaggccctgaagtggaaacggattattacaactttgaggcgctgaacctgccgaaggaacatccggcccgcgacatgcaggacagcttttacattacagaagaaatgctgatgagaacgcagacgtcaccggtgcagacgcgcacgatggaaaagcataaaggaaaaggccccgtcaaaatcatttgtcccggtaaagtgtatcgccgcgacaacgatgacgcgacacattcccatcagttcatgcagattgagggtctcgtcgtcgaccgcaaaatcagcatgagcgacctgaaaggcacgcttgaattggtcgccaaaaaaatgttcggccaagatcgtgaaatcaggctccgtccgagctttttcccattcacagagccttctgtcgaggtggatgtgacctgctttaagtgcggcggacaaggctgctccgtctgcaaaaaaacaggctggatcgaaattctcggcgccggcatggttcacccgaacgtgctgaagatggccgggttcaatcctgaggaataccagggttttgctttcggaatgggtgtggaacgtatcgcgatgctgaaatacggcattgaagatatccgccatttctataccaatgatgtcagattcatttcgcagtttaaacaggcgtaagaggaggatacacatgtttgtttcttataaatggttagaagattacgttgacttgcagggaatcgacccggccgtgcttgcagaaaaaattacgagagccggtattgaagttgagggtatcgagtataaaggggagggcgtaaaaggcgttgtcatcggacacgtgcttgagcgcgaacagcacccgaatgccgacaaactcaacaaatgccttgttgatatcggtgcggaggaacccgtgcagattatctgcggcgcccctaatgttgataaaggacagaaggttgccgttgcaacggtcggatccgtgcttcccggcaatttcaaaattaaaaaagccaagctgcgcggcgaagcgtctcacggcatgatctgttcccttcaggagctcggcattgaaagcaagctcgtggcgaaagaatatgcggaaggcattttcgtttttccgaatgatgctgaaacgggagctgacgcaatggcggcccttcagcttgatgatgcgattttagaattgggcttaacgccgaaccgcgccgacgcgatgaacatgcttggcgtggcttatgaagttgcggctatcctcggcgcagaggtaaaacttccggaggcttcatatgaaaaagcggcagaaaaagcggcggatgctgtttccgttaaggttgaagatacgcaggccaatccgcattatgccgcaaaaatcattaaaaacgtcaaaatcggcccgtcaccgctttggatgcagacgaagctgatgaatgcaggcatccgcccgcataataacgtcgtggacattacaaacttcgtcctccttgagtacggacagccgcttcacgctttcgattacgaccggttcggttcaaaagaggtcgtcgtcagaaaagcggcggaaaatgaaaccatcgtgacgctggatgaacaagagcgcaagctgtcaagcagccatttggtcatcacaaacggaaaaaaagcgcaagccgttgcgggagtcatgggcggagctgagtctgaagtccgtgaagacaccactgcgattttactggaagccgcttatttcgacggacagaccgtccgcaaagcgtcgagagacctcgggctgagaagcgaagcgagcgccagatatgaaaaaggcattgatccggcacgcgttctgctggcggctgaacgggcctgcagtctcattcaggcatatgccggcggagaagtgctctcaggcacggttgaagaaaaccatctgaaaatcgaagcaaacaatattcacgtgtctgttgaaaaagtgaacgccgtgctcggcatgacaatcgctaaagaagaaatcatcagcatttacaagcgcctcgggtttgcagtcggtgaagctgaagacgttctcgtcgtaacggtcccgtcgcgccgcggagatattagaatagaagaagacctgattgaagaagcggcgagattgtacgggtatgacaatattccgtccacgcttccggaaacggccggcacgacaggcggcttgacaccgtaccaggcaaaacgccggaaagtgagacgtttccttgaaggagcgggtctttcacaagcgaccacttattcattaacgaatgataaaaaagcggccgcttttgcgatcgaaaaatcattcaacacgatgcttgctctgccgatgagcgaagaaagaagcattctcagacacagcctcgtgccgaatcttcttgaagccgtttcatacaatctggccagacagactgattccgttgctttatatgaaacgggttctgtatttctgacgaaagaagaaaacacaaaaccggttgaaaaagaacgggttgccggagctgtaaccggattgtggcgcaaaaatttatggcagggtgagaaaaagccggttgatttcttcgtcgccaaaggaatcgttgaaggcctgctgcatcaattgaatgtgtcagaccgggttgaatttgtccagtcagaacgcaaaaacatgcatcccggccggacggcaaacattctattgaacggttcgcttgccggatttatcggccaggtgcatccggcaatggaaaaagagctggatatcaaagaaacgtatgtgttcgagcttgatctgcacgcgcttctgaccgaggaaacagaacctgtcgtgtatacgccgattccgaagtacccgtccgtcacgcgcgacattgcgcttgtggcagataaaaccgttacaagcggacagctcgaagccgttatcaaagaagccggcggcgcgctgctgaaagaagtcaccgtatttgatgtgtacgaaggtgagcatatggaagaaggcaaaaaatccgtcgccttctcgctccaatatgttaaccctgaacaaacattgacagaagaagaagtgacaaaagtacatgaaaacgtgctgaaagcgctggaagaaacgtatcaggccgtattaagaggataaagaaaaagcttgcagatcactctgcaagcttttttactatgaccgcttccgttcaacaaggcgtttcgctttttgcgtattggcaaaatgaagtttggtgaacgttctgagcgcaccttctcccttattgatgatcagcttggcggcagcttcatcgacgtgcggccccgcgccttttggaatcgtcatcccagcctcacgcgaaagcttatccatttcaattaagaaagaatatcgcgcaatgatagaggctgcggcgacggaaagatgtatgctttccgctttcgtgctgaaaaacgttttttcttttacgatatcccgtccggaaagatgcttaaaataaatgccgggctctgcgaattggtcaatcagaatcgcttccggtttaacgccgttcatttttctcagcagattggaaatcgcctgattatgaaggagcgccttcatttttccttggctcatgcctttttcctgcatctgattgtatttttcgttttttaacacaagcaggctgtaaggaatggttttaattaacagtttggcgatttcaataatctgcggatcttttaaatccttcgaatccttcacaccgagttctctcattaaagagagctttgttttgtcggcgtaggcgcaggcaaccgttatcggcccgaagtaatcgcctgttccgacttcatcagagccgatcactgacatggaggcaatgcccgccgggggagcgtaaagcgggtcggccgcttttttgacggttttctttgctttcggcgtctcagccgttccccagcgggccgcttctgtgccggcgttttttccttgaaagagaaccttgcccgagcggtaggctgtaatggtacagcccggaggcttggcctggaagacggcgccctgcggaacggcgggagtaagggagccggcataggattgtttcatttgttccatagcggaagcggatacttttataacagaatgggacacgatataatctccttttttggcacttttcactgtatataccagtgtatcataacagcccgaggctcgtctttccattcaaacgataatcgtggtatgataggaactaggattctcgcggaatggaggagaaacgttgtctgacggcaaaaaaaccaaaacgacagtaaacatttacggccagcacttcaccattatcggggaagaaagcaaagcgcacatgcgtcatgtggccggagtggttgatgataaaatgagagaaatcaacgagaaaaatccatatcttgatataaataagctcgctgtattgactgcggtcaatgttgtgcatgattatatgaaactgcaagaaaaatatgaaatactggagcggcagcttaaagaaaaggaatgaacaccatatgatagatatcatcatcttagttctgctcttaatgggcacattgcttggattaaaaagaggatttatcctccaatttatatatttaacgagtttcatcctctcgattgcgtttgcggcgcttttttacaaaagcctggccccgcatctgagctttatacccgcgcctgatttttccggcgggcaggcggctctgtcttttattaaaggaaacgtagagacggcttattacaacgcgatcgcgtttgtcattttgtttatcatcgcaaagattctgctccggattatcggagcggcgcttaatatcatcgccggcattccggtcattaaacagatcaacaaactgctgggcggggtgcttgggtttctggaagtctatttatttgcgtttatcctgctatacgtcgcatccgtactgccggtaagcgcgcttcaggatatgctcgcacaatcgacgcttgcaaatatcatcacacatcatacgccgtatctgtcagggctcctgcaagaactgtgggcccagtacggggcataaaaaacttctcttgaccggagaagtttttttcaagctctgcgtcagttgtgccggaggagaaaaatttgtatgatgaaaagcaggaaacgactgggggttaacagtatgcataaaaaagatatcatcaggctgcttgaaacgattgcggtctatatggaactgaaaggggacaacccgtttaaaatatcagccttccgaaaagcggcagcggcgcttgagcaggatgaccgcagcctgtcggaaatcgacgacatgatgtctttatccggaatcggaaaaggcacctacggcgtcattcgtgaatatatgcaggaaggtgtgtccggcacgcttctccaattgcagaaagaagttccggaaggcttggttcctcttttgaagcttccgggcctcggcggcaaaaaaatcgccaagctgtatcaggagcttggcgttcatgacgcggaatcgctgaaagaagcatgcgagcagcaaaaagtacaggggctcgccggtttcggcaaaaaaacggaggagaaaatccttcaggctctcggagaagccggaaaacagccggaacgttttccgatcggctatgcgctcagcattgcttcagtaattgaagaaaatttggcccggctgacggatattcagaaatattcccgggccggcagtctcagaagagcgcgggaaaccgtaaaagatctggattacattatcgctacagatcatccggaggctgtcagagaacagcttctttctctcccgaacgtaaaagacgtgatagcgagcggggatacaaaagtatcagtcatcctgacctttgaatatgagacgagtgtggatttccggcttgtgacagaggaacagtttgccaccacacttcatcattttaccggttctaaagatcacaacattaaaatgcgccagctggcgaaagagcgcggcgaacggatcagtgaatacggagtagaaaccatagaaacgggagacgtcaaaacattcccgagcgaagaagcgttttacgcccacttcggtctgccgtttattcctcctgagctcagagaaagcgggcaggaggtcgacacgtaccgggaagaaacggatcttgtggagcataaagcgataaaaggcgatctccacatgcactcagcctggagtgacggcgctttttccatcagagaaatggcagaagcgtgtatggcaaaaggctatcagtacatggcgatcaccgaccattcccaatatttaaaggtagccaacggtttaacagccgaacggctcaaaaaacaggcggaagaaattgacgcgttaaatgctgaatttgaaaattttcatatttttaaaggcgtagaaatggacattctccccgacggttcacttgattatgatgacagtgttctgtcggaaatggatcttgtcatcgcatctattcattcaagcttcagccagccggagcatgtcattatgaaacggcttgaacaggcgctgacgaataagcacgtggacattatcgcccacccgacgggacgcctgatcggcagacgggccggctatgaagtcgacatcgacatgctgattgaactcgccgccaaaacaaatacggcgcttgaactgaatgcaaaccccgcgcgccttgatttacggactgagcatctgatcaaagcaaatgaaaaaggtgtgactttggtcattaataccgatgcccataatatcgagatgctcgatgatatgaaaacgggcgtgaccgctgcgcgcaaagggtggacggagacaaaacatgtgttaaacgcccggccgctacacgaggtcaaagcatttctgacgcgcaatgattaagtaaggaggatcacaaaaccgtgcagcaaaaagtgttatcatcacttgaatttcataaagtaaaagaacagattaccgcacatgccgcctcatcgctcggccgggagaagcttctgcagctgaaacctttgacggatctctcagacatccaaaaacagctggatgaagtcgaagaagcatccgcggtcatgcgcttgagaggccatgctccgttcggcggtctgaccgacataagatccgctttacggcgggcggaaatcggcagtgtgctgacgccggcggaattcaccgaattgtccgggctgctgtatgccgttaaacaaatgaagcattttatcagccaaatgacagaagacggcgtcggcattccgctgatacaggcccatgcagaagaactgattacattgggcgatttggaaagagagattaactcctgcattgatgaccatggtgaagtgcttgatcatgcgtctcccgctttaaggggaatccgcacgcagctcaggacacttgaatcaagagtcagagaccggcttgaatcgatgctgcgttcatcttccgcttctaaaatgctgtctgacaccatcgttacgattcggaatgaccgctttgtcatcccggtcaaacaggaatacagatcaagctacggcggaattgtccacgatacatcttcatccggtgcgacactgtttattgaaccgcaggcgatcgtagatatgaacaactcgcttcagcaggcgaaagtaaaagaaaaacaggaaatcgaacggattctccggatgctgacggagcatacggctgaacacacacaagaaatcgctcaaaatgtggaagtgctgcagacactggatttcattttcgccaaagcgagatacgcaaaagcgatgaaggcgacaaaaccactcatgaacggagacggttttatccggctgaaaaaagcgcgccatccgctgctgccccaagatcaagtcgtggccaacgatattgaactgggcggagattattcaacgatcgtcatcacgggaccgaatacgggcggtaaaaccgttacgttaaaaacactcgggctgctgacgataatggcgcaggcaggattgcacataccggctgatgagggatcggaagcagcagtatttgacaatgtgtttgccgatatcggcgatgaacagtcgatcgaacaaagtctgagtacgttctcatcccacatggtcaatatcgtcaatattttaaaagacgtgtctgaaaacagtcttgtgctgtttgatgaactcggtgccggaacagatccgcaggaaggagcggcgcttgccatgagcatccttgacgaagttcaccggacaaacgccagagtgcttgcgacaacccattatccggaactgaaagcatacggatataacagacaaggcgtcatgaatgccagcgttgaatttgacattgaaacgctttcgcctacctataagcttctgatcggagtgccgggccgaagcaacgcatttgaaatctcaagacgccttgggcttccggagcatatcatcggccaggcgaagtcagaaatgaccgccgaacataacgaagtcgatctgatgatcgcatcgcttgaaaaaagcaaaaaaagagcggatgaagagctttctgaaaccgaatcaatcagaaaagaagcagaaaaactgcacaaagagcttcagcagcaaatcattgagctgaacgcccaaaaagataaaatgatggaagaagcagaacagaaagctgcggaaaaactggaagccgccgcaaatgaagccgaacagattatccgcgaactccggtccatcaagcaagaacacagatcctttaaggaacacgagctgattgacgccaaaaaacgtctcggagacgcgatgccggcttttgaaaaatcaaagcagccggaaagaaaaacagagaaaaaacgcgagctcaagccgggcgacgaagtaaaggtgctcacattcggacaaaaaggggcgctgcttgaaaaaaccggcgagaaagaatggaacgtccaaatcggcatccttaaaatgaaggtgaaggaaaaagatcttgagtttctcaaatcggctcctgaaccgaaaaaagaaaaagcaatcaccgccgtaaaagggaaggattatcacgtatcccttgaacttgacctcaggggagagcgttacgaaaacgccctcagccgcgtcgaaaaatatttagatgacgcggtgcttgccggctatccgagagtgtccatcattcacggaaaaggcacgggcgccctccgaaaaggggtgcaggatcttctgaaaaaccaccgcagcgtgaaaagctcgcggttcggggaagcgggagaaggaggatcaggcgtaacgattgtcgaactaaaataaaaagggagtaaacgtcatgaatgctttttgggaaaatgagcttgttgaaatcgcggcttattacagtgtagccgtcttgtgtctcgtcatttttctgaccgtgtttgaattggtgacatcctataaaaactgggtggaaatccaaaaaggcaatcttgcggtggcaatggcgaccggagggaaaattctcggtatcgcaaatgtctttcagcacagcatcgcccagcataattcgcttttgcaaatgatcggctggggcgtatacggatttattatgcttttaatcagctattttatctttgaatttctgacgccccggtttaaaattgataaagaaattgaaaaagataacagagctgtcggctttatttcatttgtcatctcagtcggcctgtcatttgtggtggccgccgggatttaaggggacggggaaaaatggagaagcttgcgaaagtgctgctgtcggcagcgggaatttttctgttcatcggacttatttatctggtcatgacatcttaatactgaaaaaaggctgctgaactagaatcggcggccttttttattgagaataccagtttatgcaggccgtatcagagcaaatgacggcttcccaattcatggcgcggatgacagacggcatgtcttgatcttccatgagaaagagtgtcgtaaaagaatcatatatgctcataaaagcggcgcgccgtttttcgtcggcaatgatcatgtcagcccgcagcaatccgcatacatccgaagccgccgtttgattgagtgaaaatatgcctttctcttcgaccggctcataataagtgcagcgctttatgccttttgaacggaacacatccaaaagtcccggaattaaaaatggtgaagtgacatcatcgctcggcaagtacagatcgggatgaagccgattaaacagcctggcggattcaggaagtgcatattcctcccgcagtgccgtgacagcgctcataagcgcaagcgccgtctctttttcagaacgcaatccgcaaacggtcatgacggttttccaggaaacgggtctgcccatcgcgatgatctcctcatcactcggatatatatgttcataaggccgtttgcgcttttgctcttcccacccatcagacatcaggacaaagggatgaagcaaaaaggcggccgacgtaaacggcttaggcagctggcgcaggataggaactccctcttcaaaatgcagcgtttccagcaaactcaacacctcctgagactcgaaatttcacatgaaacgctttccaattccaatcacccttctgctataataatagtgtataggaaaacagaagggagaggtattatgcagtctgaaaagccatggctttctcaatatcccgaagagattccgcatgagcttgaatttactgatcaaaccctgccatctaatctgacaaactccgcagctcaattcccgaaccataccgccatttattttctcggaaaaaaactcacattccaagacgttctcacagattcgttaaagctggccgcttttttacgcaaaacaggcctgaaaaaaggtgacagagccgccattatgctgcccaattgtccgcagtcggtcatcgctttttacggcgtattgtttgccggcggcattgtcgttcaaaccaaccctctctacacggaacacgagcttgagtatcagctgaaagacagtgcgccgcgcgtgatcatcacccttgatatgctgttcccgaaggtgataaaaatgaaaacgttatcaatcgtcgaacgcattattacaacgagtataaaagattttttgccgtttccgaaaaatatgctgtatacactcacgcaaaaacaacaggttcatattgattatgacggatgcgaacaaattcacaaattagcggatattttaaaaaacgaaaaagcggaggaagcggagccatttgatattgaccctgcgcatgacatcgccgtgcttcaatacacgggcggaacaaccggctatccgaaaggcgtcatgctcacacatcggaacattcaggccaatacagaaatgtgcgccgcctggatgtacaaaatgaaaaagggagccgaaaaggtgctcggcatcgtgcctttttttcatgtgtacggattgaccgccgtgctcaatttttccattatgcagggatgtgaaatgatccttcttcctaaatttaatcctttggataccctgaaaacaatcgacaggctgaagccgacggtttttcccggggcgccgacgatttacatcgggctgttgcatcacccggagctgaataagtatgatttgtcctccattgaaagctgtccgagcggttcagcggcgctgccggttgaggtcaaacagaaatttgaaaaagtgaccggaggaaagcttgtggaaggctacggattatccgaagcatcaccggttacccattcaaacttcatttggggaaaaaataaacccggcagcatcggctgtccctggcccaataccgatgccggaatctattcagaagaaaaaggcgggcttgcggggccgtatgaacacggcgagctgatcgtaaaaggccctcaggtcatgaaaggatactggaataagcaggaggagacggcgcgtgtcatcagagacggctggctgtttaccggagatatgggatatatggatgaggaaggatttttctacatcgccgacaggaaaaaagacatcatcattgccggcggatacaacatttacccccgggaggtggaggaggcgctttatgagcatgaagccgttcaggaaatcgtcgtagcgggcgtccctgattcctacagaggggaaacggtgaaagcatttatcgttttgaaaaaaggcgccgaggccgatgccgatgagcttgatgcgtttgcaagagagcggcttgcgccgtacaaagtcccgaagctttacgaattcagaaaagagcttccgaaaacggccgtcggaaaaatattaagaaggcgtttagtcgaagaggaagatgcttcccgtgaaaaccaggtgccttaaaagaaaaacttgacaaaatccggattcctttttatcatgaagttatgaatgaatagtcattcatttatcgaaggaaggaacgatgacattgaaccaaaaacggccaaagtatatgcagattattgatgcagcagtagaagtcatagcggaaaacggctatcaccaatcacaggtgtccaaaatcgccaagcaggccggcgttgcggacggcaccatctatttatatttcaagaacaaagaggatatactcatttctctttttaaagaaaagatgggccagttcattgaacgcatggaagaagaagtgaaagaaaaaacgacggcaaaagaaaaactcgccctcgttattaagcagcatttcacactgctcggcaatgaccgccacctcgcgattgtgacccagcttgagctcagacagtcaaatatcaagctgcgcctgaaaatcaatgatattttaaaaggttatttaaacatgctggacaccattttgaccgaaggaatcaagtcgggggaatggaaagacaatctcgacgtccgcctcgcccggcagatgatattcgggacgatagatgagacagtgacaacatgggtgatgaacgatcaaaaatatgatcttccggatttgtcagacaaggtattggagctgttggtgtcaggaattcatcaaaactaaagggggttgacggatgaacagcctttcgatggcggtagaacaatctgttgcggtgatcaccattaatcatcagccggccaacgcgctgtccggtgcggttttagatgagttatccggtctgttcgaccggtgtgaaacagatgacagcgtcagaagcatcatcattcgcggtgaggggaaatttttctcggcgggcgccgatataaaggaatttacgtcgcttgaaaatcttgagcaatcttctgccatggcggataaaggccagcagctgatggaaagaattgaagggtttccgaagcccgtgatcgcagcgattcacggtgctgcgctcggaggcggtcttgagctagccatggcctgccatatcagaatcgctacattagatgcaaagctcggcctgcccgagctgaatctcggcattattccgggctttgccgggacgcagcggcttccccggtacgtcggtacggcgaaagcgcttgaaatgatcggcacttcagaacctgtgaccggagaagaagcgctcagcctcgggcttgtcacgataggcgccgaacatgaggaagagctgctgaaaaaggcgaaaacgctcgcgggcaagtttgcggaaaaaagcccgcagtcgatggcttatctgcttgagctcctttattcaaacaagatctattcttatgacggcggcttaaagcttgaagcaaagcgttttggggaagcattttcatcagatgacgcaaaagaaggcattcaggcatttctcgaaaaaagaaagcctcaattcggtgggcgaagataaaggggataagattatgaatctatttgtactgatgaaacggacgtttgacacagaagagaaaatcgtcattgaagcaggaaagattcaggaggacggggccgaatttatcattaatccatatgatgaatacgccattgaagaagccattcagctgaaggaagagcacggcggaaccgttaccgccgtaaccgtcggcggagaagatgcggagaaagaactgagaaccgcccttgcgatgggctgtgaccaggcggtgttaatcaatattgaagatgatctgagcgatcctgaccaatactccatttcaactatcttatatcattatttcaaggaccgggaatatgatctgattctcggcggaaatgtcgcgattgacggcggttcaggccaagtggctccaaggcttgccgaactgctgaacattccttgcgtcacaacgatcacaaaactgacaatcagcggcgatgaagctgtggcagagaaagacaatgaaggggataccgaaatcattaaaacctcacttcctttagtcatcacggcacagcaaggcttaaacgagccgcgctatccgtcgcttccgggcattatgaaggcgaagaaaaaaccgctggaagaacttgagctcgatgacctcgacattgatgaagatgatgccgcaccgaagcttaaaacgatcgaacgttttctgccgccgcaaaaagaagcgggcagactgatcgaaggagaagccgctgagcaggcgaaagagcttgtgtcactgctgagaaaagaagccaaagtcgtataaaccgatattaaagaaactgggggatgtcagaatgggaaaaaaagtgatcgtactcggagaaattcgtgacggcgccttacggaacgtcacctttgaagccatagccgcaggcaaaaccatttccggcggaggaaatgtcatcggcgtgctgatgggaaaaggcgcagctgatgcagcaccagaactcattcagtacggcgccgacaaagtatttacggccgattcgccggggctttctcagtatacggcggacggatatgccgcggttctcggggatctgatcgaaaatgaaaagcctgatgcggttattttcggccacacttctatgggaaaagatttgtcacctaagcttgcggcccggtttgaaacggggctgatttcagacagcacggatgtaagcgttaccggagacaacatcgtttttacaagaccgatctattccggcaaagcctttgaacaggtaatttcaaccgatccgttcattttggcgacgattcgtccgaataatattcaggcattagaaaaagacgcgagccggacgggtgatatcgaagagcttgcggcgcctccggcagatttgcggacggtcattgaagaagtagtcaaaaaaacggcggacggcgtggatttatcagaagcgaaaattatcgtagcaggcggccgcggtgtaaaaagcaaagatggatttgaaccgttaaaagaacttgccgaggtgctcggagcagcggtgggcgcttcacgcggcgcgtgtgacgcggactattgcgattattcccttcaaatcggccagacgggaaaagtcgtcacgccggatttgtatatcgcctgcggcatttccggagcgattcagcacttggcgggcatgtcaaatagtaaggtcattgttgccattaacaaagacccggaagcggaaatatttaaaatagcggactacggaattgtcggcgatttgttcgaagtggttccgcttctgacccaagaatttaaaaatgccaatattcattcataatcataaaccctctggcttatttgtcagagggttttaatttgtgttaattggttcgtacaaattaaaggttgataaaataagagattgacatgtacgaaccaatataataagcttttgtaaagcgcttacaaacttatccattcagcatacatcccagatacatagatcggctgtagtgctttcattcttattaagggaaaggaatgatcaagtttgtctcacaatacggcagtcattcaaactgatatcacacggggaaccattaataaaaacatatacggacatttcgcggaacacctgggaagaggcatatatgagggcatctgggtcggaaaagattccgatattccgaataccggcggggtcaggacggatgtcgccgccgccctcaaacagcttcagattcccgtcctcagatggccgggcggatgctttgcagatgaataccattgggcaaacggcgtagggaaacgcaaaaccatgctgaatacccattggggcgggacgattgattccaatgaattcggcacgcacgagtttatgatgctttgtgaactgctcggctgcgaaccgtacatcgccggaaacgtcggcagcggaacggttaaagaaatggctgattggattgaatacatgacgtttgaagcgggcacgccgatgtccgactggagaaaagaaaacgggcgggaaaaaccgtggaagctgacatatttcggaataggaaatgagaactggggctgcggcggaaacatgcatcctgagtattatgccgacctttacagaaactttcaaacctatgtccgcaattacagcggtaatgaaatctataaaattgccggcggcgcgaatgtcgatgattaccgctggactgaaactttaatgaaaaaagccgctgatctcatggacgggctgagccttcattattacacaataccgggcgatttctggaaggggaaaggatcagcgacggagtttacggaagatgaatggttcatcacgatgaaaaaagcggcgcatatggatgaattgatcacaaggcacagcgccatcatggatcagtacgatcccgaaaaaagagtcgggctgatcattgatgaatggggcacgtggcttgatcctgagccaggcacgaatccgggctttctgtatcagcagaatacgatccgcgacgcccttgtcgcagccacgcattttcacatttttcatcagcacgcagaccgcgtacagatgaccaatatcgcgcaaaccgtcaacgtgcttcaggcaatgatcctgacagaagggaaagacatgctgctgacgccgacgtatcatgtgtttgatatgtttaaggtgcatcaggacgcttctcttttggcgacagaaacaaaagcagccgggtacgaatggaatgacggccggctcccgcaagtcagcatttcagcgtccaaacagcaaaacggagacatacatatcagcctttgcaatatcgatcatctgcacaaagctgatgtgaagattgaactgcggggcatgaaaaagacagggaagccttcgggaacgattcttcacgcggaaaaaatgaatgcccacaatacattcagcagtccggaaaacgtcaaaccgaagccgttttccgggtttgctcaaaagggcggaaaacttgaggcggagcttcctccgatggcggttgtactaatcacgctgcctgcgaatccatcttaagttttgaacgcctgccgcccggttataatacactgtataaaaaagattatttccggcgggttcgggagaaaataatataagcattaaattagcatgaacgaatgggagatgctatactaaaaatcatcatttgactattggaggaataacaaatggctatcgtaaaagcaactgatcaatcgttctcagctgaaacaagtgaaggtgtcgtattggctgatttctgggctccttggtgcggaccttgtaaaatgatcgcgcccgttcttgaagagcttgatcaagaaatgggagacaaactgaaaatcgttaaaatcgacgtggatgaaaaccaagaaactgccggtaaatacggcgtcatgagcatcccgacacttctcgtattgaaagacggagaagtcgttgaaacatctgtcggtttcaaaccgaaagaagctcttgaagagcttgtaaacaaacatctgtaagccgaaagcttccgttacggcagggcgattcctttgaaagggaatcgccttttttgatcttccaaaagctgagaatggagaaaaacaaatgttcgtgatacactgaatggacacgagaaatgaatgtaaggaagggtaacgtatgaataaacaactgaaagaaaaactggccctccttcccgatcagccgggctgttatttaatgaaagaccgtcaaaaaacagtcatctacgtggggaaagcgaaagtcttgaaaaacagggtgcgatcttatttcaccggttctcacgacgcaaaaacccaacggcttgtgacggagattgaggactttgaatatatcgtgacttcctccaatcttgaagcgcttattttggaaatgaatctgattaaaaaatacgatccgaaatacaatgtcatgctgaaagatgataaaacctatccctttattaaaatcacccatgaacgccatccgcggctgattgtcacccggaatgtcaaaaaagacaaaggaagctatttcggcccgtatccgaatgtgcaggcggcgcgggaaacgaaaaaactgctggaccgcctttacccgctcaggaaatgctcaaagcttccggaccgcgtctgtctctattatcatctcggacaatgccttgccccatgtgtaaaggatatatctgaggagacaaaccgcgagattgttgaagacattacccgttttttaaagggagggcataacgaaatcaaaaaagagctcgaagcgaaaatggcagaagcggcggaaaagcttgaatttgaacgggctaaagaattccgcgaccagcttgctcacatcgaatcgacgatggagaagcaaaaaatgaccatgaatgaccttctggaccgcgatgtgtttgcatatgcctacgataaaggctggatgtgcgtccaagtctttttcatacgccaaggaaaactgatcgaacgtgacgtcagcatgtttccgatgtatcaggaagcggatgaagaatttctgaccttcatcggccagttctactctaaaaacaatcactttctgcctaaggaaattctggtgcctgacagcgttgacagggacatgatcaccgagctgttggaaaccgccgtgcatcagccgaaaaaaggcccgaaaaaagagctgcttttgcttgcgcacaaaaatgcgaaaatcgccctgcgggaaaaattttcgttaatcgagcgggatgaggaacggtcaatcggtgcagccgaacggctcggcgaagcgctgaatatttacacgccgcatcggattgaagcgtttgacaactccaatattcaaggcacaaaccccgtatcggccatgattgtctttattgacggaaaaccgaataaaaaggaataccgcaaatataaaattaaaaccgtaacagggcctgatgattacggctcaatgagggaagtcgtcagaagaagatacacgagggtgcttcgcgaaaatcttccgctgccggatttaatcatcattgacggcggaaaaggccagattaacgcggcgcgcgacgtgctcgagaatgagctcggtcttgatgtcccggtagcgggattggcgaaagatgataaacaccgaacatccaaccttttgatcggcgacccgcttgaaccggtgttgctggagcggaacagccaagagttttacctgcttcagcgtattcaggacgaagttcaccgttttgcgatcagctttcacagacagatccggggaaaaagcgcctttcaatccgttctggatgatatccccggaatcggcgaaaaacgcaaaaaaatgctcttaaaacatttcggatctgtcaaaaagatgaaggaagcaagccttgacgatatcaaaaaagcgggtgtgccggccgcggcggcccagctgctgtttgaaaaattaaaaaaatagtattgtgcttttctgaaaaatctgctagaatgtgaactaatttcataagatcgtgttatatggtgaagatagaggtgcgaacttcaatagtaagcctttggagaatgatggattctgcgaaaaaggctgaaaggggagcgtcgccgaagtgtatcacatcccatcggtgtgattcgctggccttgcattaaataaatgtaaggctgtcaagaattcattttcttggagggctatctcgttgttcataatcaatcgtaatgatatgaaaaagcaatgagagctattcctctcattgctttttttattgtggacaaaacgctcttttctcctcacccgcacgaaccaaaatgtaaagggtggtctagtatgggtcttatcgtacaaaaattcggaggcacttccgtcggctctgccgaaaaaattcaaaatgccgcaaatcgcgccattgctgaaaagcaaaaaggccatgacgtcgtagtcgtcgtttcggcaatgggaaaatcaaccgacgcgctcgttaacctcgcggctgaaatcacatctgaaccaagcagacgcgagatggatatgcttttgtctacgggagagcaggtcacgatttcgcttttggccatggcgcttcaggaaaaaggatatgacgccgtctcttatacgggctggcaggcgggtgtccgcacggaagccgttcacggcaatgcgagaattacggatattgatatcacggcgattcgttcgcagcttgcagaaggcaggattacagtcgttgccggttttcagggcgtaacggaagacggaggcatcacgacgctcggacggggcggttccgatacgacggcggtcgctcttgccgcagcgctggaagcggataaatgcgacatttatacagatgttccgggcgtatttacgacagatccgcggtatgtccggtcagcgagaaaactggcgggaatttcttatgatgaaatgctggagcttgcaaatctaggagcgggtgttcttcacccgcgggcggttgagttcgcgaaaaactaccaagtgcctttagaagtgcggtcaagtacggaacatgaagcgggaacattaattgaggaggaatcatcaatggagcagaatttaatcgtcagaggaattgcatttgaagaccagatcacgagggtgtccgttacgggcctgacaagcggactgactactctttcaacaatcttcaccgcgctggcaaaacgaaacatcaacgttgacattattattcagacacagtcggacgatggggaagcggatatttctttctcagtgaaaacggaagatgccgcgcaaacggtcgccgtgcttgaagaatataaaaacgcgcttgactatgaaaaaattgaaaccgaaagaaaactggcgaaagtctccattgtcgggtcgggcatggtttcaaatcccggcgtcgccgcggacatgtttgccgtactggcggaaaaaaatgtacaagtcaaaatggtaagcacatctgaaataaaagtatcagcggttgtcagcgaaaatgatatggtgaaagcggtcgaagcgcttcatgatgcgtttgagctttctaaacagccgtctgccgtataaacgggcaggcaaaaaggcgggacttggagtcaccgccttttttcaattatacagggtccttcatatcccattttacagtcaggacgactttatccgctctcttttttacctgttcataagattctgcaatctgatcgttcatcaattgaatctgttcggctataaaaccggcttcaagctggaaacaaggctctttctgatgtttgagcctgctggatacgagcggtccttccagttcaaattccagttcttgttttttcgatcctgcgtttgtcaaagttccccagccggctttttcaaaaaaggcggggatttcttcccacgattgaagaggaaatttgcgggcgaggcgttttcccgcccaatacatcatcgatgaatgctccgggccgaggatatccggaagcacgatttcccggattaattcgtagccgtatgcgctgacgtcgagttcagttaaaggttctaaagctgcttcataattattcttcatattatgtattcccctctctccttcgtttattatagcttaaacaggggggaggattacaggatgatcctataaaacacgcgaaaaaatgtgagaaagatatcgcaggaaaataaaattttccctccagataatcaattccgaaaattataatttatgtacacgttttcttgacgcccttttgagggaggagtaaaatgaaattgtcaataaattttaataaagtgcttacaattgaaacgaagtgggggcagagattttagtacatttcgcacttaaatcaaacagggggtaaagtaatgtctgggaacagagagttttattttcgaagattgcattccttgctcggtgttattccggtcggcatctttttgatccagcatttagtcgtcaaccaatttgccgcaaggggagcggatgcgtttaacaaggcggccggctttatggacagtctgccgttcaggtatgcgttagaaatttttattattttcttacctttaatttatcatgcggtttacggtgtgtacatagcatttactgcgaaaaacaacgctggccactacagttatttcagaaactggatgtttgtgcttcagcgtgtcactggtattctcacccttattttcgtcagctggcatgtatggcagacgcggattgccgcgcagatgggcgctgaagtcaacttcgatatgatggcgaatattctgagctcgccgtttatgctcggtttttacattgtaggcgttttatcggtcatttttcacttttcaaacggcttatggtcttttgcggtcacatgggggatcacggtcacgccgcgttctcaaagaatttcgacttacgtgacgctgattatatttttagcgctttcatacgtaggtttaaaagcgatttttgcgtttgtgtaagagaactagattactagagggagaggggctatcatgagtcaatcaagcattatcgtagtcggcgggggtcttgccggcctcatggcgacaattaaagcagcggaatcaggcacggccgttaaattgttttccatcgttccggtcaaacgctctcactcggtctgcgcgcagggcgggataaacggagctgtcaacacaaaaggggaaggagactctccgtttgagcattttgatgacacggtatacggtggcgactttttggcaaaccagcctcctgtaaaagcgatgtgtgaagcggcgccgtccattatccacttattggaccgcatgggggttatgtttaacagaacgccggaagggctcttggacttccgccgtttcgggggtacacagcatcacagaaccgcttacgcgggagcgacgacgggtcagcagcttctttacgcactggacgagcaggtgcgcagatatgaagtggcgggtctcgtcacaaaatatgaaggctgggaattcctcggtgccgttcttgacgatgagcgcacgtgccgcggtatcgtagcccaaaatctgaccaatatgcaaatcgagtcattccgttctgacgccgttattatggcgacgggaggtcccggaatcgtattcggcaaatcaacaaacagcatgatcaacacgggatctgccgcatcaatcgtttatcagcagggcgcttattatgcaaacggcgaatttatccaaattcacccgacagcaatcccgggggacgataaactgcgtctgatgagtgaatcggcgcgcggcgagggcggaagagtctggacgtataaagacggaaaaccttggtacttccttgaggaaaaatatccggcttacggaaacctcgtgccgcgggatattgcgacacgtgaaatctttgacgtgtgcgtgaatcaaaaactcggcatcaacggtgaaaacatggtgtatctcgatctgtcgcacaaagatccgaaagagcttgatgttaagcttggcggcattatcgaaatctatgaaaaattcatgggcgatgacccgcgcaagcttccgatgaaaattttccctgccgttcactattcaatgggcggactgtgggttgattatgatcagatgacaagcatccgcggactgttcgcagcgggtgaatgtgattattcaatgcacggaggaaaccgtttaggggcgaactctctgctttccgccatctacggaggaatggtggccggaccgaatgcggtgaaatatgtttccggacttgaaacatcagcggaagacctgtcttcttcattatttgattcctatgtgaaaaaagaagaagagaaatgggccgatattatgaagatggacggcgacgaaaatgcctacgtgcttcaccgtgagctcggagaatggatgacggccaacgtcacggtggtccgccacaacgacaagcttttgaaaacggatgacaaaatccaagagctgatggaacgctttaagaaaatcaatatcaacgatacgacaaaatggagcaaccaaggggcgatgttcacccgccagttctccaatatgcttcagcttgccagagttatcacgctcggcgcatataaccgaaatgaaagccggggagcgcactataaaccggatttccctgaaagaaatgacgatgagtggctcaaaacgacgatggcgaaacatgccggtccgtttgaagctccggaatttgaatatcaggatgtcgatgtatcactgattgcgccccgtaaacgcgactactcgaagaagaaggtggcgaaataatcatgagtgagaaaaagatacggtttatcattacacgtcaggatacgcccgaaagcgcgccatacgatgaagaattcgaaatcaattaccgcccgaatctgaacgtgatttccgccctgatggaaatccgcagaaatcccgtgaatgcaaaaggagagaaaaccactccggtcgcatgggacatgaactgtcttgaagaagtatgcggcgcctgctccatggtcatcaacgggagaccgcgccagtcatgtacggcgctgattgataagctggaacagccgatccgtctgaaaccgatgaaaacattcccggttgtccgtgaccttcaggttgaccgcagcagaatgtttgattcactgaaaaaagtgaaagcatgggtgccgattgacggaacttacgatttggggccggggccgagaatgccggaaaaacgccgccagtgggcatatgaattgtctaaatgcatgacatgcggcgtctgcctcgaagcctgcccgaacgtcaacagcaagtcgaaattcatggggcctgccccgatgtcgcaagtgcgtctgtttaacgcccatccgacgggcgcgatgaacaaagcagaacgtttagaagcgttaatgacagacggcggcctcggagattgcgggaattcacaaaactgtgttcaatcctgcccgaaaggcattccgcttacgacttcaatcgccgctttgaacagagataccaatttacaagcattccgtaatttcttcggaagcgacagggtataagaaagagaaaaagagcctcttccgcgcacgggagaggtttttttataaggagctgaaggtgatgaaacaaccgcattatattgatatcccgtttgaagaatggagacagtcgttttctttctttactgaagtatcggttcgtttttcagaaacggatatgttcggccatatgaataatgtaacccctttcatctattttgaagaagcacggatcgcttatttcaaacagcgaggcataacggcgcaaaactcggaaacgatgacggtcgtcgcaagccagcagtgcgactatatgcgtcaggtgatgccgtatgaaaatctgcggatttatgtgaaagcaagcgctgccggaaatgcgtccgtcacccttcattatcttggagaaaatgagtcgggtctgccgtgctttacaggttccgtcgttatggttcaagtgtcaaagaaaagcggcaaagcggtcagctggacggagcgggagaaaggcattctgctcgcctgaacggataactatttctctaagagacgtcacctccgaagcgccctttacatatgatatcttgactatataaacccattcgtttcagattcgctctcaccttagcaaggagggttacaatacttgaaggagaaagattttcaatcaaagccgctgctgaccaaaagagaaagagaagtattcgaattgctcgttcaagacaagacaacaaaggaaattgcaagcgagctatttatcagtgaaaaaactgtacggaatcacatttcaaatgccatgcagaagttaggtgtgaaagggcgttcgcaagctgttgtcgagcttcttagaatgggtgagctagagctctgattcttgccggttttccttcttttcgagaaggagccggttatttgcgttggcgcccgggctgatgggcatgcggttaaaatcccggtttttcctttttctctgtcagtcttgcattttcttaaaaaaagaaggaaaatagacacggagcgcatagcccagaaagatccttgagtgagggatggacaaatgacatcaaaatctgtagagcatgttgcggatatcgaaaaatcactccgccatatcgctgcgatcattaaacaaaaaggaagagaaatccttaaccaatatgcaattacaccgccgcaattcgtggggcttcaatggctttatgaattgggggatatgacaataggcgaattatcaggcaaaatgtatttggcttgcagcacgacgacggatctgatagaccgcatggaaaaaaataagcttgtcgagcgggtgaaagacccggctgacagacgggtcgtcagaattcatcttctcgctgaaggagagcgcattatccaagaagtgattttgaaaagacaggcttatttgcgggatatgtttgcgacattttccgaagaagaaacagccgctttcgaaaaatcattattgaaactgcagcatgaaatgaaaagaaaatgaggcgattttgttggaacagccgataggagtcattgattccggggttggcgggttaaccgttgctaaggaaatcatgagacagctaccgaaggaaaatatcatctatgtgggagatacaaaacgctgcccgtacggcccgcgtcctgaagaagaagttcttcaatacacgtgggaaatgaccgattacctgctggaaaaccaccatatcaaaatgctcgtgatcgcctgcaatacggccacggccattgccttggaggatattcagcgcaaaacggatattccggttgtcggcgtcattcagccgggtgcgagaacggcgataaaggtcacgaaaaaccagcatatcggcgtcatcggcacggtcaataccattaaaagcagagcatatgagcaggcgctgctcgggttaaacgcagaacttcaagttgagaacacggcttgtccgctgctcgtgccgtttgtggaaagcggacggtttcttcaggaatcagcggaggaagcggttgaagcatcgcttgagcctttaaaaggtacatcaattgacaccttgattttaggatgtacgcattatccgattttaaaagatccgattcagaactatatgggagagcatgtgaaaatcatttcctccggagacgagacggcgagagaagtgagcaccatcttgtcttataaaggtttgttaaaccaatcgaaacatgcaccggagcatcaatttcttacaacgggagagcggaacggcttcgcaaaaattgccgaagactggttcggccacgaaatcggccatgtcgagtgcatctcccttcaagagccggtcagaaaataaatcaaaaaacccgctgtttacggcgggtttttttgcgcttcccggtctatttcccggacagggctcgtatacatcatagtacaaacagccttaggagggaaaagtatgctgaaaaaaggacctgcagtcattgctgcaacatgtcttacttcggcttttgtgttatctggatgcggtttgtttcaatccgataaaacagccggggaaattgacccgcctcaagacatttcatatgtaaaggatgaagcgggaattcaggcaaaaccaaagcagtcagagaaaaacggcacttctaaagccgaccagccggccaatacagtcatgagagagctgtatctgattgataaaaacggctatgtcgcagcacagacactgcctcttccgaacagtgagggaaccgcaaagcaggcccttgagtatttggttcagggagggcctgtgtcagaaatcctgccgaacggcttcagagcggtgctccctgcggatacgacggtaaatgtcgatattaaaaaagacggcactgccgtcgctgatttttcgaaggaatttaaaaactataaaaaagaagacgaacaaaaaatcctgcaatcgattacatggacgcttacccaattcagctcaatagataaaatcaaaatcagaatcaacgggcacgaactgaaagaaatgcctgtgggcggtacgccgattacgggcgatttaagcagaaaagacgggattaatattgaaacggccggagtgaatgatctgacagacacccatccgctgactgtctattatctggcggaaacagagacaagcgaatactacgtgcctgtcacaaagcggattgacaattcggaaacaaatgacatcaccgccgccgttgaacagctcgccgacggaccgggcaaagcaagcgggcttttgacggactttaataacgatgttaagcttctcggcaagccgaaagtgaaagacggccaggttacactggactttaacagctccatttacggaagcgccgacgaaaaaacaaaaatggtatcatcgggcgtactggacagcatcgttctcacgttaaccgaacagccgtcaattaaaagtgtttctataaaagtaaacggaaaatcagaactggtgaatgaaaaaggagaatccctttcaaaacctgtttcgaggccgtcacaagtgaatacgggtagtttttaatttgcgatttttgatatactaataaaaaagaggttagcgttccggctgcctctttctttattcacaatccggaacaaaaggtttatgtacatataatcggaggtaaaatatgagacacgacggaagacagcacgatgagctgcgccctatcacatttgatttggattttatcactcacccggaaggctctgttttaattacagcgggaaatacgaaggtcatctgtaatgcatctgtggaagaccgggtgccgccatttttacgcggcggaggaaaaggctggatcacagcggaatacagcatgcttccccgcgcgacgaatcaaagaacgataagagaatcttcaaaaggaaaggtctccggcagaacgatggaaattcagcggctgatcgggcgcgcgctccgggccgtcgttgatttggagaagcttggcgaacggacgatctggatcgactgtgacgtcattcaagctgacggcggaacaagaacggcttccattaccggcgccttcttggcaatggccattgcgatcggcaaactcgtaaaaagcggcgttatcaaaacctctcctgtgacagattatctcgcggccatttctgtcgggatggataaagaagaaggccttcttttggatctgaattatgaagaggattcggcggctgaagtcgacatgaatatcatcatgacgggaagcggacgttttgtagagcttcaagggacgggcgaagaagccacattctcccgtgaagatttaaacggactgttaagccttgccgaaaaaggaatccagacgcttattcaaaagcaaaaagaagtgctgggagaaacattgcctgaagtgaaataagaaagagaggcctgatcaccgtgaaagaagccattattgcgacacacaatcagggaaaagtgaaagaattcaaggaaatactcgaaccgaaaggctacagcgtctcttctttggcggaaatcggatttacggaagaaattgaggaaaccggacatacctttgaagaaaacgccatcttaaaagcggaagccgtggcaaaagccgtaaacaaaatggtcattgcagacgactccggtttatcggtggacaaccttggaggcagaccgggcgtttattcagcccgttatgccggagaagcaaaagatgataaggcgaatatggacaaggtgctgtcagaattaaaaggcatcgaaaaagagcagcgtacggcccgtttccgctgcgcccttgccgtcagcatgccggggcaggaaacaaaaacggtcgaaggtcatgttgaagggtatattgcggaaggacccgagggggataacgggttcggctatgatcccatttttattgtaaaagataaagataaaaccatggcccagctgacaagcgctcagaaaaacaaaatcagccacagggctgaggcgctcaagaaactgtcaaagctgcttgattcataagggggagcgtatgcaatgaaagtgctgataataagtgacagtcacggccttgaagacgagctggagacgattgcaaagcggcacgaagacgaagcggatctgatgattcattgcggtgattcagagcttgacgctgcacatccggcgcttacgccgtttcacacggtaaaaggcaattgcgactttggcggcgggtttcaggatgaacttcttctggacgcaggttcaaagaaaattctggccgttcacgggcatcttcacggcattaaacagtcacttttaactgttttttaccgggcggaagagcttggggcggatgtcgtctgcttcggccattcacatattgccgggagtgaagagcttcggggcaagcttttgattaatccgggcagcatccgtcttccgagagtccgcaatgtgaaaagctatgccattcttactcttacagaaagagaaggcgccgtgacattttacgacgaaacgggtcgggaattgaaggactttgggaatacaatcagtttttaacaagtgatgggggagatttcattcttccccatcaaaagtttttaaaaaaatattgacttatgatttgaacctgtatataataaatcttgtcgctgatacataaagcaaaagctgtcccagtagctcagctggatagagcaacggccttctaagccgtcggtcgggagttcgaatctctcctgggacgtacaaaaaaaagagctggtgacatcagagtgaaaactgatgccgctggccttttttatcggatgactatattgtcaattcgctgatatcatggtaaaatgatcagcagaacaatttgattttcatgtcccagtagctcagccggatagagcaacggccttctaagccgtcggtcgggagttcgaatctctcctgggacgctaagaaatcgggtgtaaagcccgtcaaatcaacctcttatatcgtttagtgaaacggtcagtataacggtcacgtaagaaattacacctgttattggcttatatcactttcggtataggaggttttttgttgtgaccaaaagaaaatgaaaatgaagctgactatgtactaaaacgcaaggtaaatatcatgaaaaaggctgagaaacgtcacaagcaaaggcttcaggaatacaaggaacagaatattggatttgccactgaggaagaggaaatatttattagacttttctacacgcagcaagaacttgaagatatctttgctggctatgacttgggagttaagaggttacacttgcagaatctatatatggagcggatgcggcaattattcgatttatataacctaaaaggcacaaactttgtaggagtctcttaattgaggctcttctttttatcgatcaaatctgatgtcgtagctccgatatttaaacaataactaataaaacccgtcttttattcacttggttaaagaatgaacctaaactaaggagcagagtagaaaaaagagcgatacatattattcctaatttttgcatgattatagtataatagacacaaacaaccttttaggaaaacggtgataacaatgagtggcaacttttcattttttcaagggaaatgggatgtacttgctaacttgggagagacagctgagagaaatgtatatcatgacccccatacaacagtaatgaaactgcgattgttcgctgaaacactaactaaatttattcttgccgctgaaaatattaaagaggcatatggtacaacgcaagtggatcgcattaacactttgcgtcgggaaaggttacttgagcctgaattaattgatatattagaggctcttcgtcgcaaagggaatgtagcggtgcatgaagcggattatggaaaagtagaagaagcaaaggctttgttgcaattaacgttccgcttgtccatttggttcatggaggtatatggtgattgggattttcaagcaccagagtatacagaacttcaagaacaagtagaacagagtacagaaacacttcagcgagaatatgaggagaaagtcaaaaagcttgaagaagaattagaggcaattcgtcgacaggcggaagtggaacaagaagaggtaaaaatcgagcgtaaaaaaatatccaaaaactttatacgtcgacagcaattaactgaagccgaaacgcgtacgattattgatggaaaactacgtgctgttggatgggaagtagacacaactgtactaaatcatcaaaagaacggaacgctgccagagaaaaatcgaaacatggcaattgctgaatggaaggtcaatggcggcaggattgactatgcgttgtttattggcttaaagcttgttggctttattgaagctaaggcaaaaaagaaaacgattcctggcgcattagaaagtcaaacaaaagtgtatgcaaaaaatgtggtacaagtcgaagatgaagtcatcacacctacaacaggtgaatataaggtgccgttcttatacgcaacgaacggccgaccatacttgaaacaacttcaagaagagtcgggcatctggttttgggattcacgtaaaccgttagaacatgctcgcccattagaaggctggcattcacctgacgacttgcagcttcttcttagtcaagatgataaggatgcgaataaacggttagaagaagaggatattacgaagtttggtttgcgtcattatcagcaaagagcggtactttccgctgaagagggattaaaagaagggcaacgaagaatgcttattgcaatggcaactggaactgggaaaactcgtacagctatcgccctcatgtatcgcttaattaagtccaaaaaatgtcgtcgtattcttttccttgtagaccgtaattcgttaggaaaacagacagaggatgcacttaaggatacaaaaattgaaggctactcatttgctgatatatacgatgtgaaatctttagaagacatgtctccagaagttgaaacgaaggtgcaaattgcgacggtgcagggaatggttagaagacttttctatagcgataacgaaaagcttccaagtgtcgggcagtatgatttcatcattgtagatgaagcacatcgtggctatacaagtgacaaagaaatgtcagaggaagaattgaaattccgtgaccaaaatgattatattagccaatatcgacgtgtaattgattattttgatgcggcatgtttaggacttactgcaacaccagctcttcatacaacagagatttttggtatgcctatttttaagtattcttatagtgaagcggttctggatggctacttagttgaccatgaaccaccatatctgtttaagacagaactttcacaagtcggcattactcttgaaaaagacgaagaagttgaagtgtatgatgttgataaaggcgagattcaactagaaaaaatggaagataccattcattttgaggttgagcagtttaataaacgggtaattactgaaccttttaatcgggcggttctaaacaaactggttgaatacattgatccgacaggaaaagagaaaactcttatctttgcagccactgaccaacacgcagatttggttgttcggttattaaaggaagcctttaaagaacgtggcgatgaaattgaagatgatgctattatgaaaattactggctatatctataagccattagatgccattaaaaggtttaagaacgagcggctgccaaatgtcgttgtaacggttgatttactcaccacaggcattgacgttcctccaataacaaatctagtattcttacggcgtatacagtctcgtattctttatgaccaaatgcttggacgtgcaacccgtctttgtcccgacattggaaaaacacactttaacatttacgatgcagtgggcatctacgataaattgcaaagctatacggagatgaaacctgttgtaaagaaacaaaattacagtatcggtgaactatatgaatcacttgccaatgctactgcagaagatgaagcttcgttttatcgtaaccaattggcagcgaaaattcagcgtcgcaagcaaaggctgaatgaagaaggaaaacaaaagtttgaagaattgtcgaatggaaaaaatgtggatgagtgggcgaaagaaattcagttatatactccgcaagaagcaaaacagcacaacatgttatttgaatatatggaagcctatcgggtaaaaggcgagaaacgatatatctccaacaaagaggatgaagtaacagatgtggttcggggatatggtgaaggaaacaagagaccagaagattatttagaaggtttcgttcgttttatccaagaaaatattaatgaaattcccgctcttcatcttatttgcacacgaccgaaagatttaacaaggcaggatttacgagaacttattaccattctagaaacgaaaggctttaagcaatcgcatttgcagacagcttggaagcagacaaaaaatgaagacattgcagcagacattattagctttattcgccaagctgcattaggtgaagcgctagttgcccatgaagcacgtattaaacaggcgatgcaaaaagtgtattcactgcatgattggactccaagacagaagaaatggttagagagaatagaaaagcaattacttaaagtgcctgtattagcaccgactgcagaagaggcattctcggaagaaccttttagaacgtctggtggctacaaattactgaaacgtgagttcggtgaccatattgatcatattgtcaatacgatcaatgagaacctttatatcagctaacgactgtgcctcttcattgaggcacttttttgggttataatgaaaaggttcgctttcaactaaaaatcatcaaatttgatttaatagattagaagcttttcaggaggaaaaaagatgaataaccaagaaatcgttcaaaaattatggaatttatgcaatgtgcttcgtgatgatggcattacatatcaacaatatgtcacggagttaacctatattttatttttaaaaatgatgaaagaacagcaaacagaaaatgtaatacccgaaggatatagatgggatgatttgctagaaaaagaagggatagaactcaaaacattttatcaacaccttttaattaagctgggtaatagcgagaatgctcaattgcgtcagatttacacggatgctgctacaagtattacagaacccaagaatttagagaaaattctgaagagcattgatggccttgattggtacaacgcaaaagaagaaggtttaggtaatttatatgaaggcttgttagaaaaaaacgcaagcgaaacaaaatcaggtgctggtcaatactttacaccgcgtgtattaattgatgtaatggtacaacttattgaccctaaacctggagaaagatgcaatgaccctgctgctggtacatttggttttatgattgcggcagaccagtatttgaaaaataagacagataactattatgatttagatccacaactgggcgttttccaaaagaaagaagcgtttactggaatggaactcgtcacagggactcatcgtcttgctctaatgaatgcattacttcatgatatcgaagggcgactggaacaaggggattcgttatctagtaatggaaagtggatgaaaaactttgatgtcattttaaccaatccaccatttgggacgaaaaaaggtggagagagtgtctcccgtgatgacctgacgtttgcaacttccaataaacagcttaattttctacagttaatttataacgctttaaaagacgatggtcatgcacgggcagcagttgtattacctgataatgtcttgtttgaaagtggggttggtgcacagattcgacgtgatttaatgaataaatgcaatctgcatacaatcttacgcttaccaacggggattttctatgcccaaggtgtgaaaacaaacgctttatttttcacaagaggaacaacagaccaagataatacaaaggatgtatgggtatatgaccttcgcacaaatatgtcttcatttggaaaacgtaatcagttatcaatggctcattttgaaaacttcatgaaagcatatgtagcagaagaccgctcaaaagtggaagatgaacgatggaacaagtttacacgagaagaaattgcaaaaaaagatgatagtttagatattggattgattgcagatgaatcattatcttcatacaataatttgccagacccgattgagtcggcagaagaagcgattgcgaaacttcaacaagcaatggatctattaagtgaagtagtagaagaacttcgagcagtggaagaagatgaggtggtcgcaaagtgagtaagaagaaaaagaccattgaagagttgttagaagaagctttagtaccagaggaaaaacaactttatgaaattccggagaattgggtatggttgtctttgaagaattcaattaatagcattcaatacggttatacagagacttcctcacttcaagtaattggtccaaaatttttacgaattacagatattcagaacgataaagtagattggagtgccgtcccgtattgtaagattaccgagaaggaatttgaaaagtataagctagaagataatgatattgtagtagcacgtactggtgcaactacagggaaaagttatttaatcgataagccaccagtgtctgtttttgcttcctatctaattaggctaagatgtaatgatattatgtttccgagatttttatgggagtttatgaagagtcctgtgtattggaagcagataacggttgtgaagaaaggtagtgcacagcccggggctaatgcacagatattgggtaatctatctgtacctttaccacctttacaggaacaaaaacggattactgagaaagtagaagggcttttaggtaaaattgaagaagcaaagcagttgattgaggaagcgaaggaaacgtttgaacttcgtcgagcggctattttggaaaaagcatttagtggagagttattaacctcaagttttaacaaaattacaaagaaaattaatgaacaaataacattagaaattccaaatcattgggaagttaaaactttaagtgatgtagtggaaaattataataatcaaagaattcccgtttcacaaaaaaagagagaagaaatggagggagatatcccttattatggtgcaactggaatagtggattttgtagatggatatactcatgaaggtgagtttgtttgtattggggaagatggtgcgaatcttttatcccgttcaaagccacaagcttttgttattagagggaaatcatgggtgaacaatcatgcgcatgtagttaaaatgaatgataatatgtgtaataactatttaatgcattatataaattttattccattaaatgattatgttactggtacagcacaacccaagttgaacagaaaaaatttagataagataccaatagtattaccgcctgttaatgagcaattttcaatttcgcaaaagatagaggatttactttcaaaagaaatagaaatgatgaatgtttgtgattctaacttacatggaattgatattattaaacaatcaattatgaataaagcattccgaggtgaacttggaacaaatgacccaagtgaagaaaatacgatcgaactactaaaagaagtgctacaagagcaagtgaaatagttgtaagagggcatccaagttagttggatgtcttttacggttgcatacatgccaagttgggtattggtttgatacagaaccactctcattcacaaactggcaatcggtaaatttcagacacgacccacattatcaatatgatttagcatgataaagtaataagaattgcagtgaaaccctattcaagttcgataatgatatcgatagcagaggtgtagacttataagtgatatcaaagaaaagataccgctgcctctatcacattgttttcgataagctacctgtttcaaaaggtacaactttttgcgacgtattctgtgaaacggtagaataagggttcagatacaaaggcgttacgataagagtatcaaataacaaggtggatttaaccagtggacaacaaagaagttggatacgttagtgtaagcagcaaagaccaaaatgaagcacgacaactggatagtatgtatgctcttggaattgatgagcgtgatattcatatcgataacaaagcgggaaagacttcaatagacctcaataccaagctttgaaattgcgtttgcgtaatggagatacgttatacatacattcattagataggctaggtcgtaacaaagagatgattttaaacgagtggaaagatatcacacagaacatctaagcacatattgttgtagttgatatgccattgttggatacacggaaatacaatgaatccatcggttctttcgtggctgacttggtgctacaggtattatcatgggttgctgaagaagagagaacgaagattaagactcatcaagctgaagggatagctgcagctaaggcacagggcaaacaccttggaagacctaaaacaagacctaaaacaactattacaactgagtttgagcaggcttataaacaatggaaagcaggagaaattacagcggttgaagcaatgaagagatcaagtatgacaaaggctacattctatcgcagggttaaagaatatgaaacaagctaaaggattcctataacttctctctttctttaatataaagattatgtggggatgtttccacattttcactgggggcatgaaagggataaacctatagtcggctcatccacacaccatgaaaaaaataacttgtcgaaacgaatctaattctagtccatctcaaattacattattttaaatgatcaatccctatcccattctttgttgcagtctggacatttccatttaataatcctatcagcttctatactgcttataccaatttttcgtgtaaaatgggcagaaccatatactttctgcgattctttcggaataggttctccttgcaaatcagctttacaaaatggacaacattctttgttatctctcatgaaaccacgcctttaaataaatacctttacgttttaatatagcagatttaactgtattaccttttcaatagggttgttttctacaatatgaatgtttgaattgtacagcataagcaaatataatagaaattaagccaatcggtcaaagttcggaaagtgaccgttatacatgaacgtgaacgaatagcgatatatagagtagctcagccggatagagcaacggccttctaagccgtcggtcgggagttcgaatctctcctgggacgtataaaaacctcaagccttgacaatgggcttgaggtttttttgtattttatttttttgttttacgaaacaaaagttccgtatttgatgaaaattgtaaagtaattttaatataaatgaaacttaatgtaatatttatcgtaataaatatatgtataaagatacttaaggcgcccttgagtgataaattatctaatttctatcatgcattttgtcaatgaatgatagaaagacagcaggaggaattagcttttgaagtacgcatttgcatataaaaatcgcaatatagaaacgatcttttgcggaaaagacgagctgtttgaggaactgaagcaatttttaatcactcaatgcggtttaatcattgttgaggtttcaagggctgattactatacggagcaggaaatgaatcagtggaatgaccgttatactttgtgaatatgaaaagaaaccggccgtgggaggccggttttagtatcatctgaatccgctcggagcgctgaagcccccggcatggccgctgaaaccgcccccgagcgcgccgggatgcgccccggcgccgaggcttccgccgacgtcactgaaggattggccgtagtacccggttgtataagggtacggaacgaattgctgcccggcgaatgacagcgtgctttgcggggtctgctgtccgtatccggatgacgggaatccctgctgaaaagaagggccgccttgatatggtgctgtatgcatcggggccggaggataataagactgcggcggtaagaccggtaaaggcggaaatccaggaggcaggccctgcatgcctgataacatcttattcatgacatcactcatttcttacgagataagaacagtgtatgcgtatgtctgtataaagagcctgttcaatcgaacggaatatctgacaagcatgccggaaggacagagaaaaatcgtgtaataaaatgtgacatattcgtatatgaacggaaaaatttcatgtaatcttgagagattaataaaaaaatgataaaaacttttaatatttacagatccctttgtaccagtaatgaaagcgtatacaaagtagattgattaatctaaattgtctaataattataaaaatgctgttgacactgcctgcaaacgggcgtaatatgagttcaaacaaaaataaataaatgattcacgctaaaaagaaaaatcataaaacactgaaaaaacaaacaagtgaaggttcttttttaataaaagagctgccataataaaaagcgcagaagaggataagtagctttgctgaagtttttcacagagagccggtaacgctgagagccggtaaaacaaatcaaagtgaactcccctcagagtgccggtctgaaatgtaaagagtaggactcggccgagtgaacgcaatgtttactcgttatcaaaacggataatcattatccatgagacggtctgcatatgaccgtaaacaagggtggtaccgcggagagcaaagccttttcgccccttttggctatcgcatgaaatgcttggctgaatgtgggtgggaaggcttttttatttgcgtcagccggcgttgcgttttatgaattggattttagaagggaacattgaaaaggaggaactgaaaatgggcacaaatgtacaggcggattctttgtctgccgaatgtacaaaaacaatgaacggggctctgatgctgattgaatcattaaagaaagaaaatgtcgagatgatcttcggctatccggggggagccgtccttccgatttacgataaactgtatcaatcaggattggttcacatcctgccccgccacgagcaaggcgcgattcatgcggcagaagggtatgcgagagtctccggaaagccgggggttgtgattgctacctccggacccggagcgacaaatttagttaccggtcttgcggatgcgatgatagattcattgccgctcgtagtgtttaccggtcaggtggccacttcggtcatcggcagcgacgctttccaggaagccgacattttaggaattacgatgccgattacgaaacacagctaccaagtccgccgtccggaagatctcccccgtgtgattaaagaggcgttccatatcgccacgacgggaagaccgggtccggtattaattgatataccgaaggatgtcgcagcatttgaaggagagttcagatatgatcacgagatcagccttccgggttatcagcctgtaaaagagcctaactatctgcagatccgaaagctcgtggaagctgtcagcagtgcgaaaaagccggttattttagccggagcgggtgttttgcacggtaaagcttcagaagatttaaaaaattatgtcgaacagcagcaaattccggtagcgcacacgctcctcggtctgggcggtttcccggcagaccatcctctttttctgggaatggcggggatgcacggcacatacacagcgaatatggcgctttaccactgtgacttgttgatcagcatcggagcgcggttcgatgatcgcgtgaccggaaatctgaagcattttgcaaaatcggccaaagtggcgcatatcgatattgatcctgctgaaatcggaaaaattatcgaaacgcagattccggtggtcggcgacagtaaaatcgtccttcaggaattattgaagcaaaacggaaaacagggacagacagaggaatggaaacagcagctttcagaatggaaagaagaatatccgctttggtatacagacaacagagaagagggctttaaaccccaaaagctgattgagtatattcaccaattcacaaacggtgaggcgattgtggcgacggatgtcggccagcaccagatgtgggcggctcagttttatcctttccgaaaggctgataagtgggtgacctcggggggactcggcacaatgggcttcggccttccggcggctatcggagcgcagctggccgatcgtaacgccacggtcgttgccatcctcggagacggcggttttcagatgacccttcaggaattagatgtcatccggcagctgaatcttcctgtcaaagtggttatcttaaacaacgaatgtctgggcatggtcagacagtggcaggaaatcttctatgaagagcgctattctgaatccaaattctcggcgcagcctgactttgtcaaattgtcagaagcctacggcattaaaggcgtccggatttcatcggaggaagaggcggaagaagagcttaaaaaggcgctttcatcaaaagaaccggccgttattgacgtccgggtcgccaaaagcgagaaagtattcccgatgattgcgccgggtaaaggacttcatgaaatggtgggggtgaaaccttgaaacgcattatcacattaacggtggtcaaccgctcgggagtattaaaccggatcaccggcctgtttacaaaaagacactataatatcgaaagcatcactgtaggccacacggaaacaagcggtgtttcaagaattacatttgtcgtccatgtggaaggcgaaaatgacgtagagcagctgacaaagcagcttaacaaacaaattgacgtcctgaaagtgacggatattacaaaccaatcgattgtacagcgtgagctggcattaatcaaagttgtttccgcgccgtcggccagaacggaaatcaatggaatcattgagccgttcagagcttccgtcgttgatgtctcaagagacagcgtcgtcgttcaggttaccggcgaatctaataaaatcgaagcgctcatagagcttctcaaaccttacggcattaaagaaatcgcgagaacgggcacaacggcttttgcgaggggaacccagcagaaggcgtcatccaataaaacaatttcaattgtataacacaaaaaagggagagattaaaatggtaaaagtatattataacggtgatatcaaagagaacgtattggcaggtaaaaaagtagcgattatcggttacggttcacaaggtcacgcacatgcgctgaacttaaaagaaagcggaattgatgtcattgtcggcgtcagacaaggaaaatcatttacacaggcccaagaagacggtcataaagtcttttcggtaagagaagcggctgcccaggctgatatcattatggttcttcttccggatgaacagcagcaaaaagtatatgaagctgaaatcaaagatgaattgacggcgggcaagtcattggtattcgcacacggatttaacgtccatttccatcagatcgtgcctcctgctgatgtggatgtattccttgtcgcccctaaaggaccgggacaccttgtcagaagaacatatgaacaaggcgcgggcgtaccggcattgtttgccatctaccaggatgtatcaggcgaagcgaaagatacggctcttgcttatgcaaaaggaatcggcggagcgcgtgcgggcgttcttgaaacaacatttaaggaagaaacggaaacggatttgttcggtgagcaggctgttctgtgcggaggtttaacggcgcttgtcaaagcgggttttgaaacgctgacagaagccggctaccagcctgaactcgcatacttcgagtgtctgcacgaactgaagttgatcgtagacttgatgtatgaagaaggattggcgggcatgagatactctatctccgatacggctcaatggggagattttgtctcagggccgcgcgtagtcgatgcaaaggtaaaagaatcgatgaaacaagtattaacagatattcaaaacggtacattcgcgaaagaatggatcgtggaaaaccaagtgaaccgtcctcgcttcaatgcgatcaatgcaagtgaaaacgagcatcagattgaaaaggtcggcagacagcttcgtgaaatgatgccgtttgtcaaacaaggcaaaaagaaggaagcggtggtctccgttgcgcaaaattaatgttttcgacacgacccttcgtgacggtgaacaatcccccggggtcaacctcaattcccgggagaaactggcgatagccaagcagcttgaaagactcggggtggatattattgaagcgggatttcccgcttcatcccgaggtgattttttagccgtgcaggaaatcgcaagaacgattaaaaattgttcggtaacagggcttgcccgatctgtcaaaggtgacatcgacgcagcctgggaagcgctgaaagacggggccagcccgcggattcacatctttatcgccacctctgacattcatctgaagcataagctgaaaatgacgcgggaagaggttaaggaaaaagcggttgaaatggtgaagtatgcaaaagaacgctttccgatcgttcaatggtcagcagaagacgcatgccgcaccgaacttccgtttctggctgaaatcgttgaagaagtgattgatgccggcgcgagcgtcatcaacctgccggacactgtaggttacctgacgccggctgaatacggaaacatctttaaatatatgaaggaacacgttccgaatatcagccgggtaaagctatcagcccattgccacgatgatctcggaatggcggttgccaactcactttcggcaattgagaacggcgctgatcaaattgaatgcgccattaacggcataggagaaagagccgggaacgccgcgctagaggaaatcgccgttgcgcttcatgtcagaaatgacgcgcatcaagccgattcatctctcaatcttcatgaattgaagcggacgagtgatcttgtcagcaaactgacgggtatggcagttccccgcaacaaagcaatcgtcggagataacgctttcgcacatgagtccggcattcaccaagacggtttcctgaaagaaaaatcaacatatgaaatcatttcaccggaacttgtcggcgtgactgctgatgcacttgtactcggaaagcattccgggcgccacgcgttcaaagaccgcctgaatacgcttggattccagtttgatagtgatgaaatcaataaatattttacgatgtttaaagaactgaccgcaaagaaaaaagaaatcactgatgatgacttgatttctcttattttagaagaaaaagtgacagacaaaaaaatcggctatgaatttttgtctctgcaagtgcattacgggacgtctcaggtgccgactgcaacagtctctttaaaaaatcaggaaaacgaacagctgatgcaagaggcggcaacgggggcgggcagcgtagaagccgtttataatacgctcgggcgctgcatcgataaaaatattgaactgacagactaccgcatccaatccaaccggaaaggcgaagacgcgctggctcaagtttttgtcagagtgaccgtgaacggaaaagaaacatcagggcggggaatcgcgcaggatgttctggaagcttctgctaaagcttatctgaacgccgtgaaccggcaattggtgctggattgcaatatagacggattaaagagacagactgcggtcggctcgtaatagaaaggagaacgtttgatttgaaaaaacgcattgctttgcttcccggtgacggaatcggaccggaagtggcggaatcagcggcagatgtattgaaaagcgttgccgaacaattcggacatgaatttgaatttgaaaacggactgatcgggggagcggccattgacgcccatcaaaactcccttcctgaggagacggtggctctttgtgaaagatccgacgccatcctgctcggggcagtcggcgggccgaaatgggaccaaaatcctccggagctcagaccggaaaaaggcctgctcggcatcagaaaaaaactcggcctgtttgccaatctgcgtcccgtgaccgtatttgaaagcttgtctgaggcgtctccgctgaaaaaagaatatatcagcggcgtcgactttgtaatcgtcagggaactgacgggcggcctctactttggagaaccgagcagacagtatgtcaatgaagcgggagaaaaggaagcggtcgatacccttttttataagaaagaagaaatcgcacgcgttgtaagagaagcttttaagatggctgccggcagaaaaggaaaagtgacgtccgttgataaggcgaatgtgctttcttcaagcaggctttggcgggaaacagcggatgaaatcgcaaaagaatttcctgatgtgacgcttgaacatatgcttgtcgataatgccgcgatgcagctcatctacgctccgagccagtttgacgtcatcgtaactgagaatatgttcggcgatattttaagcgatgaagcctccatgctgacaggctcgctcggcatgctgccgtcagccagcttatcaagttcaggtcttcacttgtttgaacccgtgcatggatctgcgcctgacatcgccggtaaagggatggccaatccgtttgcggcgattttatcagcggcgatgcttttgagaacatctttcgggcttgaaaacgaagcgcaggcggtggaaaaagcggtcgcaaaggtgcttgcagatggcagccgtacacgtgatatcgcccgggacggccaatatgccggaacgcatgacattactgaaaaagtaaaagccgcattagccggctcgaatacaaaatctatagtgtgacgctttaaagaaagcggtcttagttcataggtagagggaggaaacaaagatgatgcctcgaacaatcatcgaaaagatttgggatcggcatgttgtaaaaagcggtgaaggaaaacccgaccttctctatattgatctgcacctcattcatgaggtgacgtctcctcaggcgtttgaagggttaaggcagaagggaagaaaggtcagacggccgcagaacacattcgcgacgatggaccacaatattccgaccgtcaaccgttttgacattaaagatgaagtcgcaaagcgccaagtaaccgcgcttgaacggaattgcgaggagttcggcgtccgtcttgcggatcttcacagcgcagaccaggggatcgttcatgtagtcgggcctgagcttggtctgacacttccgggaaaaacgatcgtttgcggagacagccatacatcgactcacggcgcattcggggcgcttgccttcggtatcggcacaagtgaggtggaacatgttctttccactcagacactatggcagcagcggccgaaaacgcttgaaatccgcgttgacggaacgctccaaaaaggagtgaccgcgaaggatgtcatcttgtcggtcatcggaaaatacggggtgaaattcggtaccggatatgtcattgaatacaccggggaagtattcagaaacatgtctatggacgaacgcatgacggtctgcaatatgtcaatagaagcaggagcacgggcgggactgatcgctccggatgacacgacgattgaatattgtaaaaaccgtaaatacgcgccaaaaggcgaggaatttgaaaaagccgccgcagaatggaaagcgttaaaaaccgatccgggcgccgtatacgatcattccatcgtgctagacggcagcgagatttctccaatggtaacatggggcgtcaatcccggcatggttcttccggtcgatgcccaaataccggcgccggaaacgattgattctgaagacggtaaaaaagaagccatccgcgcgtacgaatacatgggaatcgcaccgaatcaaaaaattgaagatattaaagtcgagcatgtgtttattggctcctgtacaaattcgcggatgactgatcttcgccaggctgcggatatgatcaaaggccgaaaagtcgctgacagcgtcagagccattgtggtcccgggttctcaaagcgtgaaacagcaggccgaagaagaagggctgcaccgcgtgtttctcgaggccggatttgaatggagagaatcaggctgcagcatgtgcctcagtatgaacaatgatgtcgtgcctgaaggggaacgatgcgcttccacttccaaccgcaacttcgaaggcagacagggaaaaggcgcgagaacacaccttgtcagtccggcgatggcggcaatggcagccattcacgggcatttcgtcgatgtaagaaagttttatcaagaaaaaacagttgtgtaaggagtgcgcgaaaagatggaacctttaaaaacgcatacgggaaaagcggccgtcttaaatcggatcaacgtcgatacggaccagattattccgaaacagtttttgaaaagaattgaaagaacaggatacggcagattcgcgttttttgattggagataccttgagaacggtgagcctgatcctgaatttgaattaaaccgcaaagtctatgaaggcgcgtccatattaattgccggagagaatttcggctgcggatcatcccgtgagcacgctccttgggcgctggatgattacggcttcaaaatcatcattgctccgtcatttgccgatatttttcatcaaaactgttttaaaaacggtatgcttcccatccgtatgccgtatgatcagtggaaaaaactcgccggtcaatatgaaaatcagtcccttaacatgacggttgatttggaaaaccagctcattcacgacagtgaaggcaaagagatttcatttgaagtcgatccgcactggaaggaaatgctgattaacggttatgatgaaatttcattaacgcttctgctggaggacgacattcagcagtttgaatcgaaaagaagttcttggcttcaagcctgaaaaaagccgaccggatctgtccggcggctttttttaccgtgcgcaccatcctttcttgtgtttcctgacgcgtgttgatacacttgaaaaaaatagcgcctgaaaggaaataaagtatgacgcatgacaagaaaaaagctgatatcattcctttcccccgtctgaaagaacgcttggttgataaagggatggccgccatgaaggataaacagtatcaggaggccctcgaactgttctcagaggcggtaagccacggcgataccgagtccgacgtacatttaggcatggcgatttgttttctggaactcggggaattggaagaagcaaaacaagtttgcgagaaaatgctgaatgaagggtacggccattatttcaccgtactgcaggtgtacatgaccattttaattcagctgaaacaatatgaagaagtcaaaagcacaattgaagctgtgctggaagaaaaccagctgcccgcagaaagtgcggagcaattctaccggctgctcgaattcagccgcaaaatgaccgatcctgaccagcaggatgaagcgtgggaggaggaatacgaggacattcttgatgcggaaaaagtgctgaacagccccgctgaacaaatgaatctcattcattctctcaaagaccgcaatattgcaaaatacacgggtctcttaaaaacaattcttcaagatccgggcgcgcatcctcttatcaagacgatgattttgacgctgatggcggagcatgactacagcaagccggtccatattacaaaattcggcgattcaatgatcgcggttccgagtgaaacggttcagcctgatgcggctccgattttgcatcgcgttctccgggtgcttgatgaaacgctcggcaatgaaaaccctacattatacgctgccgtcgaggagctgtggagaaggcatctgtacgtcctgcacccttttatgccgaagtttttgaacgcagatttatgggcggcggcgcttcataaggtcggttacgagatgcacggcattgacattgagccggaggaacttcatatgatgtacgagtttgacagccgcgaactcgaagaagcctgcacgatgattaaggatattgaagaaatttcttatttgtaaatcacgccatatagttgaaagcggtaggcgttatgttataatatagtggttgtatttatgtatagcggtttaactgaaatgagaattacggttggacaggctgccagttcattacataatgattctgattcaaagcggttttttctttgacaaagccgcggattgctttagaatggaagaccgacacaacctgaatagatttttggagggaaacacatgtctgtaaaatgggaaaaacaagaaggcaacgaaggcgtattaacggttgaagttgatgcggatacgttcaaaacagctcttgatgatgcatttaaaaaagtagtaaaacaggtttctattcctggattccgcaaagggaaagttccccgcggtttattcgaacagcgtttcggcgttgaagctctttaccaggatgctttagatattttacttcctgtagaataccctaaagcggttgaagaagccggcattgagcctgtagaccgccctgaaatcgatgttgaaaaaatcgaaaaaggcgaaagcttgattttcactgcaaaagtgactgtaaaaccggaagtgaaacttggcgattacaaaggcttaggaatcgaaaaagatgacactgccgttactgacgaagatgtacaaaacgaacttaaagctcttcaagagcgtcaggctgagcttgtcgtgaaagaagaaggcgctgttgaaaacggcgatacagtcgttcttgacttcgaaggtttcgttgacggcgaagcgtttgaaggcggaaaagctgagaactactcacttgaagtaggatcaggttcattcatcccgggcttcgaagagcagttaacaggccttgaagcaggcgctgaaaaggatgttgaagtaacattccctgaagagtaccacgctgaagagcttgccggaaaaccagctgttttcaaagtgaaaattcatgaaatcaaagcgaaagagcttcctgagcttaacgacgaattcgcaaaagacattgacgaagaagttgaaacgcttgctgaattaactgagaaaacaaaaaaacgccttgaagaagcaaaagaaaacgaagctgacgctaaattgcgtgaagagcttgttctgaaagcatctgaaaacgctgaagctgatgttcctcaagcgatgatcgacactgagcttgaccgcatgctgaaagaattcgaacagcgtctgcaaatgcaaggcatgaaccttgagctttacactcaattctcaggccaagacgaaaacgcgttaaaagagcaaatgaaagaagatgccgcaaaacgcgtaaaatcaaacctgactcttgaagcgatcgctcaagcagaaaaccttgaagtaacggacgaagaagttgaagctgagctgactaaaatggctgaagcttacaacatgccggttgaaaacattaagcaggcaatcggttcaactgacgcgatgaaagaagatttaaaagttcgaaaagcaattgattttcttgtagaaaaccgttaatatggttcataataatagacataataaaacagggcgcgattaattcgtgccttgttttgtacaattatgatataactctttttcttggggcaagatagtcattgccgggctgtttttcgtcatacatatagaatgtgcaagtgcgaaacacattgttaccgtcttactggaaagtatggtaaaatgcaatacatactcgatcgtagcaagaaccgttttcttttgcccttcaggtaaaagaaaaagtgagacaagattaaggggtgaaagaatgtttaaattcaacgaggaaaaaggacaattgaaatgctcgttctgcggaaaaacgcaagatcaggttcgtaagctggttgcaggaccgggtgtatatatatgcgacgaatgtattgagctctgtacagaaatcgtagaggaagagcttggtacagaagaagaagtcgaatttaaagacgttccgaagccgcaggaaatccgtgagattctgaatgaatatgtcatcggacaggatcaggcgaagaaatcacttgcggttgcggtatacaaccattacaaacgcatcaactccaacagtaaagtggatgatgtcgagctttctaaaagtaatatttctttaatcggaccgactggaagcgggaaaacacttcttgcccagacgcttgcgcgtattctgaacgtgccgtttgcgatcgcggacgctacatctctgactgaagccggatatgtcggtgaggacgtagaaaacatcctcctcaagctgattcaggcagcagactatgatgtggaaaaagcagaaaaaggtattatttatatcgatgaaatcgataaagtagcgcgaaaatctgaaaacccgtccattacacgtgacgtatcaggcgaaggcgttcagcaggcgctgctgaaaattcttgaaggaacggttgcaagcgtgccgcctcaaggaggacgcaaacatcctcatcaggaattcatccagatcgatacgacgaacatcctgttcatttgcggcggtgcatttgacggcatcgaacaaatcatcaaacgccgtctcggacaaaaagtcatcggcttcggctctgataataaagcggcagacctggaaaaagaagaactgctttctaaagttcttccggaagacttgctccgtttcggtctgattcctgaattcatcggccgtcttcctgtcattgcaagccttgagcagcttgacgaaacggcactggttgaaattctgactaaaccgaaaaacgcactcgtcaaacaatacaagaaaatgttagaacttgatgatgtcgagcttgaatttgaaggcgaggcattatctgaaattgcgaaaaaagcgatcgagcgtaaaacaggcgcacgcggcctgcgttctatcattgaaggcatcatgcttgacgtcatgtttgatctgccgtcccgcgatgatattgaaaaatgtgtcattaccggagcgacagtcgcagacggtgaagcgccgcgtcttgtattaaaagacggtactgttgtcggccaagataaaacatcagcataacacgacaaaacctcctgactcgaattaatcaggaggttttttttcttgtcctgacccttctgaaaatgtttattccgggctttgctgggagatactagcggacagaggaatgaattggatacataaatcgttttttcaggagggaccagcatgagttggacagggatcgcattatttgtacagctgtttttcgggatagtcatcggactatatttttggaatctgctcaaaaaccagcgaacacaaaaagtgacgatagataaagaatcaaaaaaggaaatggaacagctgcgcaaaatgcgcgccatcagtttaacagaacctttatcagaaaaggtgcggccgaaaagctttcaggacattgtcggccaggaagacggaattaaagcgttaaaagcagcgctttgcggaccgaacccgcagcacgtcattatttacggtcctccgggagtcggtaaaacggctgcggcgcggctggtattggaagaagcgaaaaagcataaacagtcaccgtttcaaaagcaggctgtttttgttgaacttgatgcgacgaccgcgcggtttgatgaacgggggattgccgatccgcttatcggttcagtgcatgatccgatttatcagggagcgggtgcgatgggccaggcaggcattccgcagccgaaacagggggctgtgacccatgctcacggcggggtattgtttattgatgaaatcggcgagcttcacccgattcagatgaataaaatgctgaaggtgcttgaagatcgaaaagtatttttagacagtgcgtattacagtgaagaaaatacgcaaataccgaatcacattcatgatatttttcaaaatgggcttccggcagatttccgtttgatcggagcgacaacgagaatgccgaatgaaattccgccggccatccgttcgcgctgtcttgaagtatttttccgcgagctggaaaaggatgaacttaaaatcgttgcgaaaaaagcagccgacaaaattcagaaagagatttctgacgaagctctcagtgtgctgaccacatatacgagaaacggacgtgaagccgtcaatatgatccagatcgccgccggcatggcggtgactgaggacagaaaagaaattacgacagaagatatagaatgggttgttcattccagtcagcttacacctaaaaatgagcagaaaatcgccgatgaaccgcaagtcggcatcgtgaacggacttgccgtctacgggccgaacagcggcgcattgctggaaatcgaagtgaatgtcacgcctgcgcaggacaaaggcaaaggaagcctgaatatcacgggaattgcagaggaagaaagcatcggcagccaatcgaagtcgatccgccgcaaaagcatggcgaagggatctgtggaaaatgttctgacggttctgcgcacaatgggcatcaaaccatcagactatgacattcacgtcaattttccgggcggaggcccgattgacggaccttcagcaggtatcgcaatggccgcggggattttttccgcgattcaccgcatcccgatcgaccatacggtggcgatgacgggagaaatcagcctgacggggcttgtcaaaccgatcggcggcgtcattccgaaaattaaagccgcaaaacaggccggagcaaaaacggtcattatcccatatgaaaatcagcagtccattctgaaacgaatagacggaatcaccattaaagcggtaaaaacgttccaggaagtgctggacgtcatattggttgaccctccttcagaacaaaaaccgtttgatatccaaatgaataaagaatccgtataaaccccatttttataatggggtttttttatggaggacatcttttcctttttcagaacagaaagaaagggtatactacgaagagactgttttatatacagggcaggcggataagccgattaaagcccgatcccggaattgtacaacgatgaaaaagttgtattataatggttcatactaaagtcacggaggtgtcagtcacatggcagaagatacaaaacgcagcatcccgctcctccctttaagaggcttattggtatacccgacaatggttttacatttagatgtaggccgtgacaagtcggttcaggctcttgaacaggcaatgatgcatgatcatatgatttttttagccactcagcaggatatttcgatagacgaaccgggtgaagaggatattttcgccgtcggcacttatacaaaaattaaacagatgctgaagctgcccaacggtacgatcagagtgcttgtagaaggaattcagcgggcgcagatccttgaatacaccgagctcgaagattatacttcggtcgatatacagctgatgcatgaggatgattcaaaagacgtggaagacgaagcgcttatgcggacgctgctggaccattttgaccagtacataaaaatttctaaaaaaatctccgcagaaacgtatgcggctgtgactgatattgaagagcccggcagaatggcggatatcgtcgcttctcatctcccgctgaaattaaaggacaagcaggacattttagaaacggcggatattaaagaacgtctgaataaggtcatccgttccattcataatgaaaaagaagtgctggagattgagaaaaaaatcggtcagcgcgtcaaacgttcgatggaacgcactcaaaaggaatactacttgcgtgaacagatgaaagccattcagaaggagcttggcgacaaagaagggaaaaccggcgaagttcagtcgctcacggaaaagatagaagaagcaggcatgcctgagcgtgtcaaagaaacggcgcttaaggaattaagccgttacgaaaaagtgccgtcaagctcagcggaaagctctgttatccgcaactatatcgactggctcatcgcccttccgtggtcggatgaaacagaagataaacttgatattaaaaaagccggggaaatcttagataaagagcaccacggcttagagaaagtgaaagagcggattttggagtatttggccgtgaaacagctgacgaaaacgctgaaagggccgattctttgtctggccggacctccgggagtcggtaaaacatctcttgcaaaatcaatcagtacgagcatggggcgccgttttgtgagaatttcactgggcggagtgcgcgatgagtctgaaatccgcgggcaccggcgtacatacgtcggagcgatgccgggccgtattatacaggggatgaaaaaagccggcaaacaaaatccggtttttctcctggatgagatcgacaaaatgtcgtctgatttcagaggcgatccgtcttcggcgatgcttgaggtgctggatccggaacaaaacagcacattcagcgaccactatattgaagagacgttcgatttatcgaaagtgctgtttatcgcgactgcgaataaccttgcttccatcccgggccctctcagagacagaatggagattatcagcctgtcaggctacactgaaaacgaaaagctggaaatcgtgaaggaccacctgcttccgaaacaaatcaaagagcacgggctcacaaagagcaacctgcagattcgggaccaggcgattacagacatcatccgctactacacgagggaagccggcgtgagaacgcttgaacgccagattgccgccatttgccgaaaggctgcaaaagccattgtgtctgaggagagaaaacgcattaccgttacagagaaaaatctggccgactatctcggaaaacggatattcagatacggacaggcggaaaccgaagatcaaatcggggttgtcacggggcttgcgtatacgacggtcggcggagatacgctgtcaatcgaagtgtcattgtcaccgggaaaaggaaagctgattctgaccgggaagcttggagatgtcatgcgggaatcagcgcaggccgctttcagttatgtccgctcgaaagcggaacagttcggaatcgatccgaaattccatgagaagtatgacattcatatccatgtccctgaaggagcggtgccgaaagacggcccttctgccggaattacgatggccacggcgctcgtttcagcattaacggaccgtgcggtaaaacgcgaagtcggtatgacgggagaaatcacgctgcggggccgcgtgcttccgatcggcggactgaaagaaaaggcgctcggcgcgcacagagcgggcctgaccactattattgcgcctaaagataacgaaaaagatatagaggatattccagaaagcgtcagagaaggactgaagtttatattcgtttctcacctggatgacgttttggaacatgccttagtaggagagaagaaatgaaagtcacaaagtcagaaatcgtgatcagcgcggtcaaacccgaacagtaccctaatggggggcttccggaaatcgcgctggcgggaagatcaaatgtaggaaagtcatcttttatcaattcattaatcaatcggaaaaacttggccagaacgtcatcaaaaccggggaaaacacagaccttaaacttttacatcatcaatgatgaattgcattttgtcgacgttcccgggtacggatttgcgaaagtttccaaaagcgagcgggaagcatggggaagaatgattgaaacctatatgacgacccgcgaagagctgaaagcctgcgtgcagattgtcgacctcaggcacgcgccgtctgctgaagacgtgaacatgtatgaattcctgaagtattacggcattcccgtcatcgttatcgcgacaaaagcggataagattccaaaaggaaaatgggacaagcacttaaaggttgtcaaacagacgcttgatatggatcctgaagatgagctgattttattttcctctgaaacgaaaaaaggcaaagatgaagcatggggagccattaaaaaaatgatcagccggtaatgaaaaacccaaaacgcagtgcgttttgggttttatcgtatagttttgttccgcttgataaacaataataaaaggctgatgccgatgaaaacatacggccagtatgttttgaagtgttccgtcggaatatggacggactccagccacgccgtaatttgtttaaagaagtataaaaagagggaaaaaccaatcatggcagccgcttcgtatacatattcttttctggctgccgcaaataaggagaatccgaagacgaagagaatcatttcaaaatctcccggccaccatgagagctcaggtttggcgaaaaagtgtaaacctatgccgaaaagaagcatgccgatcaggacgtgaggcccggccgcttcctttttgccctgatacaagagcacggcacccaaaagcataaggagcaccggccattccccctgattcgcaaacaggtgaacctgtccgctctgaagccatgcgaataatgaagcggcaagcagaagtcccggtaataaaattgatgtttttttcatcctgtcacctacccgcagtaaaggatttttagtatgatgattacagtggaaacgagctttttatactatagcataacatttttgaaatctgttcacattttcccgaagaaactatgttataattattataaataataaattctatgttagaatgattataaataaattgcgatgtacgggggtgcatgaaagcgatgcatattcttgttgtgggagtagattataaatccgcccctattgaaatacgcgaaaaaataagttttcagccggatgagcttgcagaagcgatgcttcgtttaaaagaagaaaaaagcgttcttgaaaacattatcgtgtcaacctgcaaccgcaccgaaatatatgcggtggtcgaccagcttcataccggccgttattatataaaaacatttttatccgaatggttctcgctgccgaaagaagagctgtctccgtttctgaaattttatgagagcgacgcggcgatcgagcatttattccgtgtggcatgcggcttggattccatggtcatcggagaaacgcaaatactcggccaggtccgctcaagctttaaaacggcgcaggcagaaaagacgatcggcaccattttcaatgagctgtttaaacaggcggtgaccgtcggcaaacgcacgcatgctgaaaccgatatcggcgccaatgccgtttccgtcagttacgccgccgttgaactcgcgaaaaaaatcttcggctcattgtcaaataagcacattttgattctcggtgcgggaaaaatgggcgagctcgccgcagaaaacctgcacggtcagggtatcggcaaagtaacggtcatcaacagaacgtttttgaaggcaaaagcgcttgctgaccgtttctccggagaagcgcgcagcttaaatcagcttgaacatgcacttgctgaagctgatattttaatcagttcgacaggcgcaagtgatttcgtcgtgtctaaagaaatgatggagagagcgggcagacagcggaaaggccgcccgttatttatggtggatatcgctgtgccgagggacctcgatccggcgctgaacgatcttgaaggtgtttttctgtatgatattgatgaccttgaaggaatcgttgaagccaacttacaagaacgccgtgaaaccgctgaaaaagtcgagctgtttattgaagcggcaattgttgagtttaagcagtggcttaatacgctcggcgtcgtgccggtcatttcggcgctgcgtgaaaaggcgctgtccatccagtccgatacgatgcagagcattgagcgcaagctgcctcatctgacggtaagagagaaaaaacttctcagcaaacatacgaaaagcatcattaaccaaatgctgcgcgacccgattctgaaagcgaaagagcttgcggctgaagcggattcagatgaaaagctgaagctgtttatgcagattttcgatattgaggaagaggccggccgccagctggacaaaagcctggataaccgccagacggttcattcgtttcaaaaggcagaagcaaaaacgggcttacgtccgcttgtaagtgagtgagggctgtatgattgatacagcaatggcaagacttaatgaagcgacaattgttatttatgcagtaagcgtccttttttactttatagattttcttcaacacaaccggaaggctgggaaaatggccttctggttgctttctattgtctggactctgcaaaccgtctatctttcttattttatgtggcagacgggcagatttccggtcttgaatattacggaggccctttacttttatgcgtgggtgcttgtcacgctctcacttgtggtcacgcagattctgcgggttgattttatcgtgtttttcacgaatgtcatcggtttctcgatgattgcgatccatacgttttcaccgacggatcagcattcggccgctttttccggccagctggtctcagagcttttggtcattcatattacaatggcgattctgtcttacggcgctttttccctttcttttgtcttttcgcttctttatcagtttcaatattctttattaaagaagaaaaaatggggaaaatggctgttgagaattgaagatttgtcaaaacttgattatatggcttacgttttaaatgtcatcggggttccgatgctgctgttgagcctgatattaggcgtgatctgggcgtatgtgtcgctggaaacgctgtactggtttgattcaaaagtgctcggctcgtttattgtgctgcttttatacagctactatttatatatcagattgattaaggaactgcagggaaaagtggcggcgttatggaattcagcatgttttctcgtgctgatgattaattacttcctgctcggaagcctgtcgcaattccattggttcagttaacgcacgcgcccaaacagattcgggaggaaagaaaatgagaacgattaaggtaggttccagacggagcaaactggctatgacccagacaaaatgggtgattaacaaactgaaggaattgaacccttcctataactttgaaatccgggagattgtcacaaaaggcgaccgcatccttgatgttacactgtcaaaagtgggcggcaaaggtttgtttgtcaaagagattgaacaggcgctgctgcatcaggagattgatatggcggttcacagcatgaaagacatgcccgccgttttgcctgagggtcttgtcataggctgcataccgaaacgtgaggatccgcgtgatgcgctgatttcaaaggggcatcaaaagctggacggcataaaagaagggggcatcatcggcaccagcagtttaagaagaagcgcccagattcttgctgaacgccctgatcttacaattaagtggatcagaggcaatatcgatacgagacttcaaaagcttgaaacggaagattacgatgctattattttagcggctgcgggactttcgagaatgggctggaaagatgatgtcgtatctgaatttctcgaaccggaccgctgtctgcctgcggtcggccaaggcgctcttgccattgaatgcagagagtcggatgaggagcttttgaagctgtttgcgcaatttaccgatgagtatacgcagcgcacggtggcagccgaacgggctttcttacacgcgatggaaggcggctgccaagtgccgatagccgggtatgcgtccgtcaatgaccgggatgaggttgaattggtcggtcttgtcgcgtctccggacggaaagacgatttataaagaaacagcggcgggacatgatccggaagaaatcgggaaacgctgtgcggcgatgatgtctgaaaaaggagccaaagcattaatcgacagcgtgaaacaggagctcgatcaggatggcaaatgaccttcctttacaaggaaagaccgtgcttgtcacccggaacaaaagacaggccgcaccgttccgaaaaaaagtggaggcgctcggcggaacggctgtttccgcttcgctgatcgcttttcaggaagcgctcccggatgaatgtgcggacagtctccgggaagacctttctgagccgggatggcttgtgtttacaagcgtaaacggtgtccggttctttttttcctatcttgatcggcacggtcttgcgctttcgggacggaaaaaaatcgcagccgtcggtgaaaagactgcgcgcgccctgaaagagcggggagcccggacggatgcgatgcctgacgagtatgtggcggaatgtctggctgatactttaaaacggcacgcatcagctgccgaacccatttcagtgataaagggcaatttatcacgcgatgtcataaaagcggagcttgagccgcttggctatcaaataagggaatgggtgttatacaataccattcaggatgaaaaaggcatggacgagctgagacgggctgcatcccgctctcattttgattttattacgtttaccagctcatcggcggtgcatacgtttatgcacgcggtcggagacggagaaaaagcgtgggaaaacagcggtgcgagctatatcagcatcggccctttgacagagaaagcgctcttggaatacgggatctcatcccatgtgcctgacatctatacgattgaaggcatgctggacgtcatgtgcagcatgtcgggaaaggattgataatgatgaatcaaacatttaacagacaccgccgtttgcgcgcgaacgctgagatgagagatttagtaaaagaaacacgtcttcacccttcagattttatttacccgttatttgtcgttgaaggacttgaaggaaaaaaagaagttccttccatgccgggggtttatcatgtatcactcgatttgttaaaggatgaaatggctgagctgatatcgctcggcattaagtcggtcatcgttttcggcgtgccggaagaaaaagacgcctgcggaacccaggcttttcacgatcacggcattgtgcagaaagggattgctgaaattaaaaagcattatcctgaaatgatcgtaatcgctgatacgtgtctctgtgaatacacggatcacggccattgcggcgtcgtgaaagacggagaaatcttaaatgacgagtcgcttgagctgctggcgcagacagccgtcagccaggccaaagcaggcgctgacatcatcgctccttcaaatatgatggacggttttgtcacagtgatcagagaagcgctcgacaaagaaggattcacgaatattccgatcatgtcttatgccgtgaaatattcaagtgaattttacggtccgttccgcgacgcggctgacagcacgccgcagttcggagaccgaaaaacatatcagatggatccggccaaccgcttggaagcgctccgtgaggctgaatcagacgcggcagaaggcgctgactttttaatcgtcaaaccgtctatgtcatacttagatattatgcgtgatgtgaaaaaccgccatcacctgccgctggtcgcatataatgtgagcggggagtattccatggtgaaagcggcagcccaaaacggctggattaaagaaaaagaaatggtgctggaaattttaacgagcatgaaacgtgcaggagccgatctgattatgacgtatcatgcaaaagacgcagcaaaatggcttgctgagtaacgatttcatttgacgggagctgaggcagatgagaagctatgaaaaatcaaaagccgcttttaaagaagcgcagaaactgatgccgggcggagtgaacagcccggtgcgcgcgtttaaatcagttgatatggacccgatctttatgcagcgcggaaaaggatcgaaaatttttgatattgacggcaatgaatatatcgactacgtcctgagctgggggccgctcattttgggccacacgaacgaccgggtcgttgaaagcctgaaaaaagtagccgagaacgggacaagtttcggagcatctactgaggtggaaaacgaactggccaaattggtcattgaccgtgtgccgtctgttgaaatcgtgcggatggtcagctccggcacagaggcgacaatgagcgccctgcgtctggcaagaggatataccggccgaaacaaaattttgaaattcgaaggctgttaccacggccatggtgattcactgctgatcaaagcgggatccggagtggcgacactcggccttccggacagcccgggcgtgccggaaggaatagcaatgaatacgattaccgttccatacaacgacttggaaagcgttgcactcgcattccgggagtacggtgaagatattgccggggtcattgttgaaccggtagcaggcaatatgggcgttgttccgccgcaggaaggctttttacaaggacttcgcgacatgacggaacagtatggcgcgctgctcatttttgatgaggtcatgaccggttttcgcgtggattataactgtgcgcaagggtatttcggcgtgacgcctgacttaacgtgtctcggcaaagtcataggcggcggtcttcctgtcggtgcgtatggcggaaaagctgacattatggaacgaatcgcgccgagcggtccgatctatcaggctggaacattgtcaggaaatccgcttgccatgacagcgggacttgagacgttacagcagctcacacctgaatcttaccaagaatttgtgaaaaaaggcgatatgcttgaagaaggcatttcaaaagcagctgcagcacatggcattccgcacacgtttaaccgggcgggttcaatgatcggcttctttttcacaaatgagcctgtcattaactatgaagcagccaaatcttctgatttaaagctgttcgccaagtattataaagggatggccgacgcaggcgtatttctgccgccgtctcaatttgaaggattgtttctctccactgcgcatacaatggaggatattgaaaataccattcaagccgctgagaaagtgttccaggcgatcagccgctgataccgaaaagccgatgcaagcaagacttgtatcggcttttttcaatgcctccattatcatatttttccggattgcggcatacacctttagtgacatctaattgtatggattagatgaaaggaggatatgaacttgccgcataatcaccgattgcaattttctgttgaagaatcaatctgtttccaaaaaggacaggaagtttctgaattactttcgatttcattagaccctgacatcagggtgcaggaagtaaatgattatgtctcaattaaaggatcattagaacttactggcgagtacaacatagatcacagcagtcattttgaagagcttaatagggagatgaggcatgtagaggaagtgagggcgagggaggatggcacggccgagctcattcattgtttcccggtggatattacgattccgaaaaataaagtgagccacctcaatgatgttttcgtatttatcgatgcctttgattatcagctgacggattcaaggatcttaaccattcaggctgatttggcaattgaagggctgcttgaggaatccgagccaaaagagccggagatccctttgtacgtggctcctgaatttgccagagaagaaatgatcaatcttgccggacatcatttggaggacgaaaacgaaccagaattaatgatacgccatgagcctgaaatacctttgagtgtatcaaaagaagcagcacaagaaaccgagaagaacgaggaagaaaccccgcctttactcaggcaggaggaagaagagcagggagctgccccgattctgagagagcaggaagaagaagagcaggaagcagccccgattctgagggagcgggaagaagaagagcaggaagcagccccgattctgagagagcaggaagaagaagagcaggaagcagccccgattctgagagagcaggaagaagaagagcaggaagcagccccgattttgagggagcaggaagaagaagaacaggaagcagccccgattttgagggagcaggaagaagaagaacaggaagcagccccgcttctgagggagcgggaagaagaaaagcaggaaacagccccgattctgagggagcaggaagaagagcaggaagcagctccgattctgagggagcaagaagaagagccggaagcagccccgattttgagggagcaagaagaagaagagcaggaagcagccccgattctgagggagcaggaagaggtgccgaaacctgtttcctttactgagcctcctcctcccgtttccttccaacacgaagaagagcaggaagaagctgaggagcctgcaatcatgtcggctgtgaggaatgaacctgtatttgacgatgattcagcagaagtgcaggaagagccaaaagatgataacgagccggttttccctgcgttcactctgactccgcatgcagaaaaaccaaaaattgcggaacagcccttccttcaaaaagaaaaacagccagaggccgagccgcttctccgtcagagcgatcatgaggcggcagaagacgaagatgagcctgcggtttttcaagaagagcaggcgcccgtttatcgcgagttcgttccggaacggcaggaagaggagttttacagcgctcctaagctgcttgaagaagagtctcaggatgaagtagggttcgaaattgaggtaaggaagatggcgccgccggaggaggaaaccgggaagcctctcgatttgtcttttcagttttccaaactgccgcctgaggagccggcgcaagctgaaccgcctgagccgcttaagtctgaaagaaagaatgaagaagcggcaccgggaaccgagcagaaggaaaatgacaactctcattacttgacaaaattatttacaagggaagaagaaaagttttcaagaatgaaaatttgtatcgtacagcagcaagatactatcgaccgggtgtgtgaacgatatgacataacatcccagcagctcatcagaacgaatgctttatcgtttgatgacgagcttgaagaaggtcagcttctgtatatacctgaatataataacagccatgcgtaagcacaaagaggccgtaaaaatgtggtgaatggaatggaagcagtccaatcagtgcttcaggaatacgggctggcggctgagtatattgagcctgtcagcccgcatgtttggaaggtctactcaaactacggcatttttgctttgaaacagctcaagccggcccgcagcagtgaatttacggatcttatgattgagattgaggagaaaggctaccgatcatttgtgccgatctgccgcacgtatgccggcgatttttttgcgggaacacagacggagaattcttattatttaatgccttggcttcagtacgatcaggaagaggaacgggaccaaaaacatgtttacctttttaaagaggtcgcgaagctccactccgcgactgtgcgggacatccaaatccggactgaagatatcagcggcttttatgaagcaacgaaaagagattgggaaaatgataagcttgtctatgaacaattcgccgaccgggcggaaaaagagtggtatctttcaccttttgaactgcaggctgttacgtatcttacagaaacggtttctgccgtcaattttgctctggaacgtctggaagaatggtttgacgcggcaaaggatcatgacaagacgagagcggtgatcaaccacggcagcttatcgagccgccactttctgtataatgatgcgggatcgggctttttcacgaatttcgagaaagctgcgctgggccctccgcaaaacgacctgctcggcttttactccagaatgttcagaagctatccgaaagcatgcccggaatgtctggactggttttatacgtatcacaaatcattcccgctccgtgaagcggaaatcagcctgtttctcagctatatggcttatccgtccgccatgtacaaagtgctgaaacggtatcagaccggccaaaggggctctgaaaaagaagagtgtacgcaattattaagagcgttttggcagatgaaaaatgttgagccttttctcatgaaggttcatcagattgagcgggagaaaaaaataaaagcggaaaacgagtcctcttcataacgggactcgtttttttatatccattccaaatgcagggcgcacgctaaaaacagcaggatggcaagcagcaggacatcaaaagtcgtcggaaagaaaatcgtcctgatcccctgaaagatcgtaatcgggataatgacttgcacggatacaaggcggatctgtctggcccactgggggagcgaataagaattgaatttttttctcacgggcaattcctcctcacattcgcctttctatgtatcgtatgtaagggaaagggcggggtgcatgcccatttatgtatgacggcagcggtttttggaaaagatgattgacgaatcaaaaacacttttactataataaagaacataataaataagatcatgagctgatataaatacacctgctttgaacgggaagagtacaagaaagacgcatgaagagagagaagctactgtgctgaaaggcttcttatgccgtctcattggaaggtcgcccgggagcataatttcttgaacatacagtagagaaattcgggccgcacccgttatccgtttaagtgcatgaacaaatctgttcatgaaaaaaggtggtaccgcgaaagagcttttcgtcctttatcaggatgaaggctcttttttagttgctcagccatttctaaacatgctggagggttatcatggatacaaacgaacaaacaatgccgacaaaatatgatccgtctgcgattgaaaaaggccgctatgatttttggctgaaaggaaaatattttgaagcgggcggcgatcaaacgaaacagccgtattctgtcgtcattccgccgccgaacgtgacgggcaggctgcacctcggacatgcgtgggatacgacgctgcaagatatcgttacgcgtatgaaacgcatgcagggctatgacgtgctctggcttccgggcatggaccacgccggcatcgccactcaggcaaaagtcgaagcgaaactccgcgaacagggcacaagccgttatgatctcggccgtgaaaagtttttagaagaaacgtggaagtggaaggaagagtatgctgatttcatccgcagccaatgggccaagatggggctcggactcgattattcgcgcgaacgtttcactcttgatgaagggctgaacaaagcagtgcgggaagtattcgtcaagctgtacaaaaaaggcttgatttacagaggcgaatatatcatcaactgggaccctgccacaaaaacggctttatccgatattgaagtaatttacaaagacgtacagggcgcgttttatcatttgcgctatccgttagcagacggttcaggctcaattgaaatcgcgaccacccgtccggaaacgatgcttggcgacacggctgtcgcggttcatcctgaagatgagcgctacaagcacttaatcggcaaaacggtgattctgccgattacaaaccgcgaaattccgatcgtcggcgatgattatgttgatatggaattcggatcaggcgccgttaaaatcacgcctgcccatgacccgaatgactttgaactcggaaaccgccacaatttagagcggattctcgtcatgaatgaagacggaacaatgaatgaaaaagcgctgcaatataacggcatggaccggtttgaatgccgcaaaaaactcgtcaaagatcttcaggaatccggtgttctctttaaaatcgaagaccatatgcattctgtcggacatagtgagagaagcggcgccgttgttgagccgtacctgtccacacaatggtttgtcaaaatgcagccgctggccgatgctgcggttgaccttcagtcaaaagaagagaaagttcacttcgttcctgaccggttcgagaaaacgtacctgcactggatggaaaatatccgtgattggtgtatttcccgtcagctgtggtggggccaccgcatcccggcttggtatcataaagaaacaaaagaagtgtacgtcggccttgaggcgcctgaggacagtgaaaattgggaacaggattcagacgtgcttgatacatggttcagctccgcgctttggccgttttctacaatgggctggcctgatgaaaacgctgaagactttaagcggtattactcaaccgatgttcttgtaacgggatatgacatcattttcttctgggtatcccggatgattttccaaggtcttgagtttaccggcgagcgtccgttcaaagacgtgctgattcacggcttaatccgtgacgagcagggcagaaaaatgagtaaatcccttgggaacggcgtggacccgatggatgtcatcgacaagtacggagcggattcactgcgctatttcctggcaaccggaagttcaccgggacaggatctccgtttcagttatgaaaaagtggaatccacatggaacttcgcaaataaaatttggaacgcctcccgttttgcattaatgaacatggacggcatgacgtatgacgagcttgatctgtccggtgaaaaatcagttgctgataagtggatcctcacaagactgaatgaaacgatagaagacgtaacccagcttgcggatcgttatgaattcggtgaagtcggacgccacctgtacaactttatctgggacgatgtgtgcgactggtatatcgaaatggcgaagcttccgctgtacggggaagatgaagcggcgaagaaaacaacccgttctgttctggcatacgtgcttgaccagacgatgcgtcttcttcacccgtttatgccattcttaacggaagaaatctggcagcaccttcctcatgaaggcgagtcaatcacgatcagctcttggccggttccggtgccggaacatacggataaagaggcagcggcggatatgaaactgctcgttgaattaatccgttctgtccgcaatatccggagcgaagtcaacacgccgatgagcaagcaggttgagctttatattaaaacagctaccgaagacattgccggccgccttgagaagaaccgttcttacgttgaacgctttacgaatccgagcacgctgaaaatcgggacggatatcactgcggcagacaaagcgatgacagcggtcgtcaccggagcggaagtcattctgccgcttgaagggctgattaacattgatgaggagatcgcccgtctgcaaaaagaattcgacaagctgacaaaagaagtcgaacgcgttcagaaaaaactcggcaacgaaggattcattaaaaaagctcctgagcatgtcattgaagaagaacgcggaaaagagaaagactacacggcaaaacgcgaagctgtccggcagcggattgcagagctgaaaggctgataaaacagcggggcggtttcctaagaaaccgccttgtcgtataaaagaggggatttcattgtttaatacgtacaaagaagcgatcagctggattcacggcagactcaagttcggcgttaagccgggccttctccgtatggaaaagctgatggaaaaactggaacacccggaaaagaacattcgcgccattcatgtggcgggcacaaacggtaaaggatcgaccgtcgcttttatccgttccgtgcttcaagaagccggttataaagtcggcacgttcacatcgccttacattattacgtttaatgagcgtatcagcgtcaacggcacgccgatttctgatgaggaatggagaacgctcgttaatgacataaaaccgatagtcgatgagcttgataagaccgatgccggaacggtgacagaatttgaaatcattacagcgtgtgcatttttatattttgcgaagcgggctgatatcgattttgtcatttttgaagcggggctcggcggcacatttgattcaaccaatattgtgaatccgctcctgtcggtcattacaagtatcggacatgaccatatggcgattttaggcaataccatcgaggagatcgccgggcagaaagccggtatcattaaaaattccattccggttattacgggcgtcaatcagccggaagcactcggcgttattgaagcggaagccgataaaaagcaggctccgtatcagtcactatataaaacgtgcagactgtttaatgaagcggcgcttccgtccggtgaaagcttttcgctggaaacggaaacgagatgctatgaaaacattcaaacgtcgctgatcggcattcaccaaagacagaatgcggcattggcgatattggccgctgaatggctgaatcgcctggaagccgcagccatttctgaagaagcgatgcgaaacggcctgaaaaaagcatcgtggccgggccggtttgaacgtcttcaaagccgccctttagtgtttgcggacggcgcccataacgaagagggcgttgaaacgctgatagaaacgatccggcagcgctttgccggtaaaaacgtccatgtcgtattcagcgcattaaaagacaaaccgtatcaggaaatgattgaaaagcttgaaaccgaagcggattccattcactttgtatcatttgactttccgcgtgcttcaagcgccgaagccctttataacgcaagcagtctagcggataagagcttcgatgagaacccggacagtgtgaaagaatggatagaacaaaaagacggggcggatgatgtcatcatcattaccggctccttatattttatttcagaaatgagaaagcggcttatctgacagcccctcggatgcccggcagaccattttacggttttgccgggtgtttttatgctgaaaatatattttcagccatttcagtcatggtgtttttctttgctataatctgagccagattgatagtaaaggtgtggtctgagtgcttttgattctgttttttctcggcttgattttcggttcttttttttatacagcagcgtgccgtatcccgctgcgaatctcggttatttcgccgcgttcagcctgttcgttttgccgcttgccgctctcctggggggagcttgtgcccgtcgtttcctatattctgcaaagaggcagatgcagaaactgtcgtgcgaagctgtcggttatgtatccggcggcggaatgctggacggcgtgtttattcacggctgcaggcattcatttcggtttctcaaaagaactgttagtcgcgctgttatttctgtctctgctcatgattgttactatgacggatctgcaatatatgctgattcctgacaaggttctgctgttttttcttccgcttttcatcgccggccgtatgttttctccgctggattcatggtatgcagggtttgccggagccgtttgcggattttttctgcttgtttttatcatgtttgtcagtaaaggaggcatcggcgcaggtgatgtgaaactgtttggggtgatcggcctgacgctcggcgtgaagctcgtgctcattgcattctttctctccgttatgatcggagccgtatacggtatgtgcgccgcagcccggggcaggcttggtaaaaagcagccatttccgtttgcgccggccatctcagtcgggagcgctttgagttatttatacggtgaagagctgttttcgttttacatcaagctcgcttcaggcggggcttgaaaaatttggcgaacgttttttggacaagacgacaaaagtcttgttcttttttttttcgcctatgctaaagtgtgaaccatgatcagttcaaggtacggccaagacgaatgcaagggggaagagacgttgaaaaaaaggaagagcaaaaagcacagcaacgcaaaaaacaatgcccttaaagtaaccattaacggacaagaagaaacgatgtatggacaagaagatgtgaaagaaggcggggagaaaaccgtcacattttcaaattgggaagaaacaaaaaaggcggagcaggagaccgccgcatcccatgaagatccgaaagaagaagatttcaattgggatcatgagaagaattctgaggtatttgaagatgacccgaaagtcgttcctccataccagaagaaaaaaaacggctctcattttccgaaaaaaaagcagccgtcttctccagttaaaaaagcggtcacgacaattgccgttgcggctgttttaggcaccgggctcggccttgtcgccttaaatatgtcgggaagtaaagaagcctccgctccggcatcagctgacaaaggttcacaagggcagacggcgaaagcgggagatgtttctaaagacaaatctgaaacagccggcacaggagatgcggaatcttcagagggaaactataaaacatatgcggtgcaggccggaaaattttcatcagaaaaaggagcgcaaacccttgttgaccagctgactgaaaaaggatactcggccgtctctctggctaaagaagacggatacacatacgtgatcgccgggcttgcagcggaaaaaagcctatcacagcaattgggtcagacactgatagaccatgattttgaggcttggggcggaaaagagctcagctttgcggtcgattcaggactggaagactcttttaaacaggcatctgagctctccgccaaagcgattactggcaaagatctttcaaaaacggaagtggctgaagcggcaaaagcggcagacggtgcagatgccgctgacaaaaagcagaaagaggccgtgcttcaagcgctgaaagaactggaaacgtcggggtcagaatccggctggaaagcccaaaaagagcttttaagtgttgtaaaatagtatctcatttcccgtcatccggcgggattttttattttgtcatcaaaaagttatttttctgaaattgtggttgcccgtttgatttggtaggatagacaagtatctttttttcttaagcaaaccctgaaaggatgacaatcatgacaaaacgcttaatactcgcatcacaatctccgcgaagaaaagaactccttaatcttcttcagattccttacagcattattgcaagccgcacagaagaaaaattaaatcgaaacctttcgccggaagaaaacgtccaatgtttggccgagcaaaaagccggagctgtattggccgaaaatcccgatgcagtcgttatcggggctgacacgatggtgtgcatagacggcgagtgcctcggcaaaccgcgtgacagggaagaagcggcacacatgctgcggaggctttccggccgaagccatcaagtcattacggcggtcagcattcagacgcatgaccggaaagaaacgttctgtgacacgacggaagtgacgttttggccgctcagtgaagacgacatacagctctacattgaaacaaaagaaccgatggataaagcaggtgcatacggcatccaaggaaaaggcgcgcttttagtgaaaaaaatagacggtgatttttattctgtcgtcgggcttcctgtcgctaaaacaatgagagccttgaaagaatttaatataaaagcttgatgttcaaaccgggaaggggaacaaggaggggttgatcatccgtgatctgccgttaaaattaagagatttccccgaaaaagaaaaaccgagagagcggcttctgcacttcggagccgaacatctctctaacaatgaattgctcgccatcctgctgcggacgggaacgaaacatgagtccgtcatgaacctcgctcaccggctgctgcggacgtttgacgggctgcgactgttaaaaggcgcctctgcccaggagctttccagcattccgggaatcggcacggtgaaagccgttcagattcttgccgcaattgagctggggagccgcattcataagacatccgccggggagcattgcgtcatccgctctccggaagacggggcgaagtatgtgatggaggatatgcgctttttatcccaggagcattttgtctgtttatatttaaataccaaaaatcaagtcattcataaacgcaccgtttttatcggaagtctgaattcatctattgtccacccgcgggaggtgtttaaagaagctttcaaacgatccgccgcgtccttcatttgcgttcacaatcatccttcaggagatcctacaccgagcagggaagatatagaggtaaccaggcggctttttgagtgcggaaatttaatcggcatcgagctgctggatcatttggtcattggtgacaaaaaatttgtgagtttaaaggaaaaaggatatttgtaacactttttttttcgttgatttaagatataatagattttatgagtttttccctttagggtatttttgctttaagaaaggaagatacatacatatgttcggaattggtacaagagaccttggtatagatttgggaaccgcgaatacgcttgtgtttgttaaaggaaaaggaatcgtagtgagagagccgtctgtcgttgctctgcaaacggatacgaagtccatcgttgcggtcggtaacgatgcgaaaaacatgatcggaagaactccgggcaacgtggttgcgctccgtccgatgaaagacggcgttatcgctgactatgaaacaactgcgacaatgatgaaatactacattaatcaggctgtgaaaaataaaggattgtttgcgagaaagccttacgttatggtgtgtgtgccgtcaggtattacggccgttgaagaacgggcggtcatcgacgcgacaagacaagcgggcgcacgtgacgcttatccgattgaagaaccttttgcggcagcaatcggcgcgaatcttccggtatgggagccgacgggcagcatggtcgttgatatcggcggcggaacaactgaagtggcgatcatttctttaggcggcattgtcacgtctcagtcaatccgcgtagccggtgacgaaatggacgactcaatcatcagctatatcagaaaaacatataatctgatgatcggtgaccgtacggcggaagctattaaaatggaaatcggttcagcagaaaccggtgaagaaaatgcgtcaatggaaatccgcggccgcgatcttctgacaggtctgccgaaaacgatcgaaatcacgggaacggaaattgcaaatgcactgcgtgatacagttctctcaatcgttgacgcggtgaagagcacgcttgaaaaaacaccgcctgagctggccgctgacattatggacagaggtattgtattaacagggggaggcgccctgctccgcaatctcgacaaagtcatcagcgacgaaacgaaaatgcctgttcttatcgctgaagatccgctggattgtgttgcgatcggcactggaaaagcactggagcacatccatcttttcaaaggaaaaacaagataatcaggagttaaatagaagaggtgtatcacgatgccgaacaaacggttaatgctattacttctgtgtattatcatattggtggctatgattggattctcgctgaagaacggccgtaataccacctggcctgaaaagctgatcggtgatacgacgggagtatttcaaaacatttttcacacgcctgccgaatattttgcagggttcttcggggacataaaagacctgaaaaacacgtacaaggaaaacgaacgcttaagacaaaagctggacggacagacacaatatgaagcgaagctccaagaactcaaagatgaaaacaagaagctgcgtgatgaactcgggcatgtcaaatcaatttccgactatgatccgattttagcgaccgttatcgccagaaaccctgatcaatggtacaagcagatcatgatcaataagggaacgaagcagaaagtggccaaagacatggctgtcacgaacgaaaagggtgcgctggtcgggaagatcaaaagcagcggactcaacagtttcacatccgccgttcagctgctgagcgatgttgaccgcaataacagagtggccaccaaaatctccggcaaaaagggaagcaaaggctacggtttaattgaagggtacgataaaaagaaacagaccctgaaaatgaccatccttgagccggatgaaaaacgtgaagtgaaaaaaggcgacctcgtggagacatccggaacgggcggcgtatttcctcaagggcttacggtcggggaagtgaccgatgtagaatcagatgcttacggcctgacgaaaatcgcttacgtgaaaccggctgccgacctgtacgatcttgaccatgtcatcgtcgtgaaccgaagcgtagcaacaggggaggaaggatcgtgaaacgtttccttctccctttgattatgattttggtcttttgtgcggaaagcatctataccgatctggtgcgttttcctttcgtttccgtcgagcagcaggtcgttccgcattttcttttgcttgcgctgatttttatgtccgcttatatcaaccaaaagcatgcggtgatctacggtttcattttcggatttctttatgacatcaattatacgggtgttttaggcgtttatatgtttggttttgccggtttatgctatctggcggccaaagcgtttaaagtgctgcagacaaacgccctgatggtcattctggtcgcggtgctgagcgtatgtgtgcttgaattttacgtctacggcattcagacgttaatccgcagcggcacaatgacgtttaacgattttgtcattcagcggttcttgccgaccgctttgctgaatattgcgggggccgttatattagtcctgcccttcaggctgttttatataagtctgaagaaagaattaagagatgagtaaaaaggattttatctttttttgacgaaaagagtatgttgttgaggtgaacattgatgaagaccaaaaagcagcaatatgtaacaataaaaggaacaaaaaacggcttaacattgcatctggatgatgcgtgttcttttgatgagcttctcgatggtcttcaaaacatgctgtcgattgaacaatatactgatggcaaaggccaaaaaatcagtgttcatattaaactcgggcatcggtatctgtatcaggaacaggcagagcagctgactgatctgatcgcgtcaaagaaagatttagtcgtgcattcaattgacagtgaagtcatcgccaaagaagaagcgcagcggatgaaagaggagcaggaaattgtttctgtttccaaaatcgtccgttcgggccaggtgcttcacgtgacgggagatttgcttttaatcggagatgtgaatcccggcggtacgatcagagccggaggaaatatatttgttctcggttcattaaaagggattgcccacgcgggttataacggaaataaccgggctgtgatcgccgcatccgaaatgatgccgacacaattgaggatcaatcacgtgttaaatcgctccccagaccacattcaaaaagggaacgacatggaatgtgcttatttagatactgacggaaatatggtcattgaacgccttcagcaattggctcatttaagacctgatctaacaaggcttgagggaggaatgtgaaattgggtgaggctatcgtaataacttcgggaaaaggcggagtaggtaaaacaacaacatctgcaaacctcggtaccgccttagccattttagggaagcgcgtctgtttggtagacacagatatcggactgcgcaaccttgatgtcgtaatgggtcttgaaaacagaattatttacgacttagtagatgtaattgaaggcagatgcaagacgcatcaagcgcttgtcaaagacaaacgttttgatgatctgcttcatttaatgccggctgcccagacaagcgacaagacggctgttgtccctgagcagatcaaatcgcttgtgcaggagcttaagcaggaatttgattatgtcattattgattgtccggccggaattgaacaaggctataaaaatgccgtctccggagctgataaggcgattgttgtgacgacgccggaaatatcagcggtgcgggacgctgaccgcattatcggacttttggagcaggaagatattgaaccgccgcgccttatcgtgaaccgcatcagaaatcacctggtgaaaaacggtgacacgatggatgtggatgaagttgttcatcatctgtctattgatctcctcggaatcgttgctgacgatgatgaagtgatcagggcttcaaatatcggcgaaccgattgccatgaattccaaaaaccgcgccagcattgcgtaccgcaatatcgcccggcgcattttaggagaatccgttcctttgcaggtgcttgaagagcagcaaaaagggatgatggcgaaaatcaagtcatttttcggcgtgcgttcataatatataccagaatacaaagatctgatgaagcccagcttatcaggtcttttttgtttttcaagagcgcatatttgcaatggacaagacataggatgtacaaacccaacgattgcaaaggatgatggcgatgagtcacagagctgatgaaattagaaaaagactggccaaaagaagaaaacagcggcctgaatcaaaacggactttcgttcaaaacgcccgaactcaggattttcccgcgtggcagacggtcaaggagcaggaaaagcacaagcttctaccggactacgaatatcaaacggaacacccgcccgaatttaacggacggcatccattgatcagcgctcattctattattttaaaatgcctgctggccgcctgtctcgtactgatctccgctattgcctataaaactgacaaacagccgttgagtcagatcaaaccggcgatcgcacaaacctttcaaaaggaatttcagtttgctgccgtaagcaattggttcgtatcttccttcggaaacccgctcgcttttcttacgccgggaacgaaaaagaaggacggtcaggtggcggtcagtcaggatatggccgttcctgccgcggggaaaatccagcaggactttcaaaataacggagagggcgtcgtcgtcgaaaccgccagcgaagccattgacagcgtaaaagaaggctacattatggaagtgagcaaagataaaaaaacagggctgacggtgaaggtgcagcacgccgacaatacaagcagcatttacggccggctaaaagatgttaacgtttcattgtacgactttgtcgataaagggaaaaagatcggttcgatcaagcttaacgataaaagtaaaggccagtactatttcgcgatccaggatggcgataaattcatagatccgatccaggtgatcacttttgatgaataaatggctcagcctccttttcaaagttcatgtccatccttttctttggattatcatggggcttggtcttatgacggggcacatcaaagcgctgctgtgtcttttgctggtcgtatccgttcatgagctggggcatgctgctctggctgtgtttttttcgtggcgcataaaacgaatctttctgctccctttcggcgggacggttgaggtggaggagcacggaaaccggccgcttaaagaggaattcgcggtcatcctggcaggcccgcttcagcatgtgtggcttcaggcggcagcctggctctttttcatgtcaggttttgcaagtgagcagacatttgagatgtttaccttttataatctctctattcttttcatcaatcttttgccgatctggccgcttgacggcggaaagtttgtgtttttatacttctccaaacaaatggcttttcaaaaagcgcatctcctcagcctgcagacatcggccgtttccgcgcttttgctctgctgctggattgtgctggccgtcccccttcaggtcagtgcatgggtgctgttcgtctttctcgccgcttctttatgggatgaataccggaagcggcactatattcagctgaggtttcttttggagagatactacggcaaaaaccgcgatgttgccatgctacatcctttgacggtcgcggccgatgccaaagtaaagcatgtcatggccgaattcaaacggggatgcaagcaccccattatcgttgaaaaagccggcgaaaagctcagccagctcgatgaaaatgaagtgcttcatgcgtattttgccgataaacggacagattcctctatggaagacctgctgctgccttactagaaatagattgacatatccttttggttctgatatattttttaatgttatggatgtagcaccaatgctacaaccgctcgggacaggtgataagagctttaaagccccctgttgctggcgagtcttagtctaataggaggtgcagagaatgtacgcaatcattaaaacaggcggaaaacaaatcaaagttgaagaaggtcaaactgtttacatcgaaaaacttgctgctgaagcaggtgaaacagtgacgtttgaagacgtattgtttgttggcggagacagcgtgaaagtcggcaacccaacagttgcaggcgcgacagttacagctaaagttgaaaaacaaggccgtgcgaaaaaaatcactgttttccgttacaagccaaagaaaaatgttcataaaaaacaaggtcatcgtcagccttatactaaattgacaatcgaaaaaatcaacgcgtaagcatgattgaggcaacaattcgaagatcccggaatgacgggggcatattgtcctttgaaatgacgggacatgccgattttgctgaacatggacgagatctcgtatgcgccggggtcacggctgtcgttttcggagcggtcaatgcggttatcgcgctggctcctctcgaaccgattcttgatataggcgaggacgggggttatttctactttgaattccctgaagctgctgatcaggaagctttgcaaaaagcgcagctgctgattgaaggcatgattgtttctcttgaaacgatcgagcgggattacagtgaacacttacggttgactgcaaaccaaatataggaggtgagttacatgcttagattagatcttcagtttttcgcttctaaaaaaggtgtaggttctacaaagaacggacgtgactctgaatctaaacgtttaggcgctaaacgtgcagacggtcaattcgtaacaggcggatctatcctttaccgtcaacgcggaacgaaaatctacccaggtgaaaacgtgggccgcggaggagatgacactctttttgctaaaatcgacggaactgttaaattcgaacgtttcggccgtgaccgcaaaaaagtgagcgtatatcctgtagctcaataatgacacaaaaaactccggtcgttgactggagttttttttgcagtaagcggagtaacatcaagaatgaaaagcagaggatgcgtgagtgaaccccgccttgaatgaggacatcagcttcccatacccactggatatgttccccaagcagtgataccaaaaatgtttctgcctggcatccgcatagtatgcgatccgaaaaaggaacatgatgaaccaggaaaaacaagtgtttttttaacaaagccttctctgttataattcatagtacacacttatcaagactcctaaaaagaaattaaacgattgggagtgcgaaaatgaaggatgtatcgaagaaacaagaagaacctgtaagcgatgcggctctgatcaatgagctgatccaattaatgggccatttccgtcatgattggatgaataagctgcagctgataaaaggaaacttaagtttgcagaagtatgacagggtcgttgaaattattgacgaaatggtcatagatgcaaagcacgaatcaaagctctcaaacctgaaaaccccgcacttggcgtttgactttcttacatttaattggaagtcccgttatatgaggctcgaatacgaagtgctcggagaaattaaagatttatcggcatatgatcaaaagctgtcgaacctgatgagaaaactgtttcatctgttcggtctggcggtaaacaatgaaagtgaaaatcatctgaccgtatcgctgcagacggatcaccctgacagacagcttattgtatatctcgattttcatggaacgattgcaaatgcagatgtgtttgatgaatttcgcaaatcccggtatgaggactttgatgtcatgcaatttgagctgaccggccatgaatgtgtggccgaaattggaatgaactagcggttttttacggtttagaacggaggatattatgtttgtagatcaggtgaaagtatatgtaaaaggcggcgacggcggtaacggaatggttgcgttccgccgtgaaaaatatgtgccgaaaggcgggcctgccggcggtgacggaggtaatggaggcgacgtcgtttttgaggttgatgaaggactgcgcacgctcatggacttccggtaccagcggcatttcaaagcgatacgcggcgaacacggcatgtctaaaaaccagcacggcagaaatgcggacgatatggttgttaaagttccgcccggcacagtcgtaacggatgacgatacaaaacaggtcattgccgatctgactgagcacgggcagcgcgccgtcatcgcaaaaggcggacgcggcggacgcgggaatacccgctttgcgacaccggccaacccggcaccgcagctgtcagagcacggagagcccggaaaagagcgctatatcgtgcttgaactgaaagtgcttgcagacgtaggtctcgtcggcttcccgagcgtcggaaaatctacgcttctgtctgtcgtttcatcggcaaagccgaaaatcgccgattatcattttacaacgcttgttccgaatctgggcatggtggaaacggatgacggaagaagcttcgtcatggcggatctgcccggtttgattgaaggagcgcacgaaggagtcggcttaggccaccaatttctccgccatatcgaacggacgcgcgtcatcgttcacgtcattgacatgtcagcgatggaaggccgtgatccgtatgaggattatgtgaccattaatcaggagctcagtgaatataatctgcggctgacggagcgtccgcaaattatcgttgcgaataaaatggacatgcccgaagcggctgaaaatcttaaagcgtttaaagaaaagcttcaggatgatcaccctgtcttcccgatcagcgcggtgacgagagaagggctccgcgatcttctgtttgaagtcgccaaccagctggaaacaacgcctgaattcccgctgtatgatgaagaagaactggcggaaaaccgtgtaatgtacacgatggaagatgaagaaattccatttaacattacccgtgatccggacggtgcgtttgtgctttcaggtgacagcctggaacgcctctttaaaatgactgacttctcccgtgacgaatccgtcaagcgttttgcaagacagatgcgcggtatgggcgttgatgaagcgctcagagaacgcggtgctaaagacggcgatatcatccggcttctggaatttgaatttgaatttattgattaaaaaaacggagagcttgcgatgcaggctctctgatgtaaaagggaggggtgcaggtgaaagaagagacattttatttagtgcgtgaagacgttctgcctgatgcgatgcggaaaactctagaagtcaaaaagctgctggacagaaaaaaggctgaatcggttgcagatgccgtgcagaaagttgatttaagcagaagcgctttttacaaataccgagatgcggttttccccttttacacgatggttaaagaacaaataatcacacttttctttcatttggaggatcggtcaggcgcgttatcccagcttttgcaggcggtggctgactcaggaagcaacgtgctttccattcaccagacgattccgcttcagggcagggcgaatgtcacgctctcaatcagtacgtccgcaatggaagaaaacattcatacgttaatgaataaactgagaaaatttgattttatagaaaaagttgagatcttagggtcaggcgcgtaaggagagaagagacatgaaagtcggttatttagggccagaagccacatttacacatctagcagtcagttcctgctttcaaaacagcgtgacacaagcaccttatcaaacaataccggcatgcatggatgcggcggttgcgggagaagttgatcttgcatttgttcctttggaaaacgcgctggagggctcggttaacttaacgattgactatttgattcatgagcagcctcttgcgatcgtgggggaaatgacgctgccgattcaccagcatctgctcgttcacccttcgagagaaaatgagtggaaaaagcttgagaaaatttattctcattcccatgcgattgcgcaatgccacaaatttcttcaccggcatttttcgtccgttccttatgagtatgcgaagtcaacaggtgcggctgccaagtatgtcagtgagcattcggaccttccgatcggcgtgattgcaaatgaaatggccgccgctacatacggattgagcatcgtgaagcgggatattcaggattatcaggacaaccacacgagatttgtcattctttcgcctgaaaaagacgtctcattcgaagtgaatgcgaaactgtcttcacggccgaaaacgacgatgatggtaacgcttcctcaagatgaccaatcaggtgcgctgcacagggtgctgtccgctttttcatggagaaacctgaatttatcaaagatcgaatcgcgcccgacaaaaacgggtctcggcaactatttctttattattgatattgaacaggcgatggatcaggttctcattcccggtgccgttcaagagatggaagccctcggctgccgggtcaagcttctgggaacatatcaatcctattcgatataaaaaaagcccttcagggggcttttttttaatcttttattaaaatacccgcgtcgtccagcgcttggcaggcttggtcaatccgctcttttgtcggggcgcttaacgtatggaggtgcacgcctccggtcagctgtgaaaggtaagcggcatttgtcgagttaatgtgatccatgaattgtttgacttctttccgtgtgctgactcttatggcggcggttaaatcgccgtatacggggtgttcaataatgacgtcctttatggtgacgccttcatcgacaatgagttcaagctcttcttccgtccgctccgggccgtgcagacaggcgacaatccgttcggcgtttttttcaccgccggcattcatgctgatgtataagtagccttggctcgtcgcgatgatcggctcgttttttgctttcaagagtgatatgtcctgtacgatcacctgtcttgagacatttgcttttttggctaattcgcctcctgttaatggcgagccggcttctttcagccaatgaagcagcatgtcgcgtcttttctccccagtaagcttcgttccttctgtcaaattgctgattctcctttcttttgctcccacagcgccgtaaatgtatgtatcagcatatcgagctgttcacatgttgtttcgtttccgaatgagattcggaaaaactgccgcgcttcccgttcggtttttctcagcgccttcatagctgaagaagggccgtggctgccggcggaacatgcgctcccggttgagatgcaaatatcgttacgattacattctaacataatatattgtccttcaaaggagtgaaaaaaacacccgacaatgtggggcaggcattcaccgccggtttcttcctctgaaaatgaaatggggaggccttgacgccgaatttggtcatacaaataattcctcagcctgtcagcatgcttacggtgttcctccatatgtttcactgcatactccgcagcagcggtaaaagcgccgatggccggcacattcaccgtaccgggcctgaacccgttttcatgcacggtatacggataaaccgggttccagctgacaccgggccgaatgtaaacagccccggtgcctttcgggccgtatactttatgaccggagacggaaagggcgtcgattcctgcctgatccgcatcaatcggcagtttgccgaaactttgaacacaatcgcaatgcagcaaaatgtttcgatggtgaagaaaagcggccaggcgatccactggctggatgaggccggtttctgaattggcgtgctgtatggaaacgagccccgtgtcaggacggatatgagccgccagtatgtcctcggttataagtccgttctcgtcgggatatatgatggtgacatcaattccccgatcagctaaaaacgccgcggcattatggatcgaatggtgttccattgcggtcgtaataaaatgttttttgtgaacgggcagaccgtgcagcaatgattggacggccaggatgttcgcttccgttccgccgcttgtaaagtaaatgccgtctgcggctccgccgatcaattttcctgcagaatgtctgcaatattccagcacgtccgccgctcttcctccggcgtcatgaaggctgcttgcattgccgtatacctctgtgctgagatgctgaaagacttttgcggcttctttgcttaaaggcgctcccgccgcgtaatcaagataaatcatacagcccgtctcctatccgtttatgttaaaaaaaagcttgagtttattttatcgctgtgtaaatataggtgtcaagacaggtgtaaatataacaggagggtgatgtatgtctgaaaaaacaattatcgtcattggttccgggacggcggcccttgcctgtgcttcctcatttcctccgtcataccaagtgaccgtcatcacaaagagaaacgtaacgaacagcaattcgcattatgctcaaggcgggattgctgtttcatacgcaaaagatgactctttagaatcccatgtgaacgatacactgtatgcgggatgcggacacaatgacgtgacagccgtgcggcatttgctgaaaagcggacagagcatgataaacaggctgatagaaggccatttcccttttgatacgaagtcggacggaacgttttgtctcggcagggaaggcgctcattccaaaaggaggattctgcacgccgggggagatgcgaccggacggatgttggttgagtttctggttcagcagctgagggacggcatacggattattgaacacgagacggttgttgatctgctgattgaacacggacgatgcgcaggcgttgccgtaaaggatgcttcagggactgtttcttacagaagagcggattgtgtagtgcttgcatcaggcggctgcggcagtctgtaccaatatcacacaaatgattccgccataacgggagacggcatcgctcttgccttccgcgctggagctgagatcacggatatggagttcacccagttccacccgaccctccttgtgaaaaacgggactgtgtacggcctgatttctgaagcagtgagaggagaaggaggatatttagcggatcgcttcgggcgcaggatcatggctggcagacacgcactagaagatttggcgccccgggatgtggtttcacgggcgatttatgaagaaatgatgaaagaaaatcctgtttttataaattgcagccgaatagccgattttaagaaacgttttccgaccataacagaaatttgtcaaacagccggtgttgatcttgaaagcggaattcccgtagcacccggaatgcattttttaatgggcggagtaaaagccgatacatgggggaaaacatccgtgcctgatttgtacgccataggcgagaccgcctgcacaggattgcacggggcgaaccgccttgcgagcaactcactgctggaagcgctggcaagcgggcaacgatgtgctgaacatatcattcaaacaccgttaaacggaagatataaaaaaaccccgaagaaatttgacgtcatcttagaagtgccggacacaacgcttcatgtgctccaagccaaaatgacaaccggagcgggcatcgtcagggaaaaagaaaacatgcaggcgctggcatcctggcttaacaacgtatctgtgcgtcatataaatgtgaaggatatcacaatagaacaagccgagctatcctgcctatggaagactgcgcaacttgttgtgacctcagcccttattcgggaagaaagcaggggcgctcattttcgcgctgattttcccgggacggagaaagagtggcacggaaaacaaatcattcattcaacatctggaacagttatcagaaaaaacgaaaggattggggaactatggacattctgcagctgaaacaaatgctgactcatttttttcaggaagatatcggaacgggtgatgcgacgtcacaagcgattttttctgatcagcaatgtaaagcgcgaatcatcgcaaaaacagatggcgtgtttgccggagaagccgttatccgtgaaggatggaagcttttacacgatgatatccgcatccgctccctgaaaaaagacggagaacggatgaaaaaaggagacgtgctcgctgaaatggaaggccaggcggcggctcttcttacgggggagcgggtcattctgaatctcttacaaagaatgtcaggcgttgcgacaatgacggatgaggccaaaaggcgtcttgatgatccgtccattaagatttgtgatacgagaaaaacgacacccgggctcagaatgctggaaaaatacgccgttcgggtcggaggcggctttaatcatcgcttcggcttatatgacggcatcatgataaaagataatcatattgccgcctgcggatcgataaaggcggccgtggagcgggcaagaaaaacggcggggcagatgcttgcggttgaagtcgaaatcgaatccgaacagcagctgctcgaggcaatagaagcgggcgcagacgttattatgtttgacaactgtccgcctgagtccgtccggcgttttgcaggcatgacaccgggccatatcaaaacggaagcatctggaggcataacgctcgacacattgcccgcttataaaggaacgggcgtccaatatatttcactcggatttctgactcattcagtaaaaagcgccgacatcagcatggatgttgaggctgcggaacagggggatttttaagatgtctatttttgacgtgttaactgcatcagccgaaatgatgccgagccattataaagacatgagcaccggagaaatggagaagcgggtcgctgccattaaacgggatttcggaaagcgcctgttcattccggggcatcactatcaaaaagacgaagtaatacaattcgccgatacggcaggtgactccctgcagcttgctcaagtggcagaaaaaaataaagaggcggaatatattgtgttttgcggcgtgcattttatggcggaaaccgctgatatgctgactggtgataaccaaaccgtcattttgcccgatatgcgcgccggatgctcgatggctgatatggcagatattcagcagacggacaaagcatggcaagagcttcaagaactgtacggtaacaccatcattccgttaacatatgttaactcgacggcggaaattaaagcattcgtcggacggcacggaggagcgaccgtcacctcttcgaatgcccggagtgtgctgaaatgggcttttaaacaaaaagagagaattttatttttgccggatcagcatttaggcagaaatacagcctatgatctcggcattccgctgacagaaatggctgtatgggacccggggcagaaccgattgcttactgaccatccggaaaacattaaagtcatcctttggaaagggcattgctccgtacacgaaaagttcacagcggaaaatatttctcagctgcggcagcgggattccggcatccgcattatcgttcatccggaatgttcgagggaagtggtctcgctcagtgacgacagcgggtctaccaaatacattattgatacgattgaacaggctgaaccgggaagcaagtgggcgatcggaacggaaatgaatcttgttcagcgcctcattcaatcgcatccggataaacagattgaatcattgaatcccgatatgtgtccgtgtctgacaatgaacagaatcgatctgccgcatttattgtggtcgcttgagcagcttgaaaaaggcgagctgaagggtgtcattaaagttccggaagcggttcggacagaagcgcttcgtgctttgaacagaatgctgagtcatacgtagttataaaaatttcccctccttcccaaattttttatcatcatgcccagtccatcggcatatagtgtgaagaaacgtattgtaatgacaaatgtaccgttcacgttttgtgcataggaggggaaaacgttgaaaattcatatcgttcaaaaaggcgattcgctctggaaaatagctgaaaaatacggagttgatcttgaagagttaaaaaaactgaatcatcagcttagcaatccagacttaattatgcctggaatgaagataaaggtgccttcagaagccgttccggtcagaaaagaacctaaggccggcttcggaacgtctgcgcataagcatgagcatccatatgccaaagaaaaaccgaaatcagttgtggacattgaagacaccataccggaagaaccaaagccgtcgattccttatgtgccgccaatccctgaaaagcatgaaaatgtgctgccggaagctgatatgaaccaatattacccgtccaatcagctgtttcagccgtggtcgcctcctaagccggaggaaccggtgacacattttgtcgagccgaaagaaaaagagcatgacaataacattccacaacaggaggaaatgatcaacatggaaaacgcgaattacccgaatatgccaaaggcgcctgaagccggaaagatggaagaagaaaacgccgcttatcatctgccgaacatgccaaacattccgaatgtcccgtttccgaatatgccggccgttgaaccgccttttatgcattacccgatgccgtgcatgccttgtccttgtccggttccggtgacaccgatgctgccgggttctggattatgccatccgtgcttcccggtaggcggaggtttcggcggttttggaggaggtttcggaggctttccggtcatgccgatgccgttaccgtacggattccatcatccgggatttgggccgcatgcgggttacggtgaatatgaaaatcaggcccatgaaaatgcagagcattatgatggttctgcatctggtttcggcggtgctccttacggtcaaatgccgtattacggcggatattcgtcacattacgcacacgcccctcatcatgatggaaaatataaggatgatgattgcggctgccatgattcacatcatcaccatcatcaccaccacggttcacatcaccatcacgcaaatatgcctgtgcagccgtatccgaatatgggtgcaaacgcaggacattttatgccttacggcggagcaaatcccaatgtcgcgccgaatcagccgagtccaaatcaagtattcggacggccggaggaagaagaagattaatgtttcgggacgatgtatgtcgttcctttttttatgtccaactgaggaatggacataactgacaagcttaaacccgccgcctgacgcacatcctaaacatgagcggaaaacgctcaaacagcgatgaatccacggggggtttttccattgggtaaaaaactgatgacgatcgcgggcgttttagccgtgacggcaagcttaacggcatgcggagcaaataatgccatgaatgacggacgctacaatcagtcaacacgtccggtcggatattattcgaatgataatggtaacggcagaggccagtacggaatggaccatcaaggacccgtttctgaaatgatggaaaaccgaaacggccgtcataatacgacaaatgtgtccgaccagtacgcccctaatgacggggttccgttaacgacggacggcacatataacggccgaaatgtcaatacgccgccggcagcaatgtcttataatgggtatgacaacgccgaaaacatcaggttggcggcaaaagttgcaaaccgcgtgaaaaaagtaaagggcgtacaggatagtcaggtcatcgtgactgacacgagagtcgtcattgccgtcagaacaaatcatccttttacgaaaaatgatgataaacatgtcaaacatgcggccaaaaaattcgcggacggccgtacaattcaagtgtttaccgacaacgctacttttacaaagctgcaagacatgaacagaaacagccgttaaacgggactgccggatgatttcatccggcagtatttttatggataaagcttcatcatttctttacatattcttaaaacgctctttatattgcggtgttaacataaaaataataaaacgtaacggaggggccgggatgaaaaaaacggagcatgacaaaagccgcggagcaaaaactgtgtatctgaccgtaaggggataccggctcaaactgacgcccggacaaatgaaactgatttcagccggccgggcgtaatcatcggggcagccctcatatagagagctgctttttttcggctgaaacagacaaatgaaagaaaacggttaagcaccggcatctttggtcaaactagcatcaagagtttgattgaataaagaggtgttattggtgaaacgaatttgcggtgctcgtctattgtttatgcttatcttatcggctgcagtcctgatttgcggaggaaaaggcgcatacggggcggaggtcgagcattacgggccgcttcgggtgcatgtccagctggaaaaggtctatcttgacggtgatgtcggcattgaacatacggatgaaaccgttttagcgatggaggatttttgggccgcatatgccggctggacgctcgttgagcagaaaaaaggcttcgtccttttccgtaagcatgttgatgatatttctccgctcagtaaggttaacggttatatcggcgtcacggacggaggcgtcatctccacttttcacggccgtcccggatcgctggccgagccgattcagtctttcttccagattgatatagaaaggctggaaagccgattgcaaaagcacttggaacacggcataccgtacagaacaaaagcggagtttgagagcgtgatcgatcatattaagacttacagcggatgactttgacgcaagacatgtgacacatgtcttttttttctgaatggaaggtgtcaaagcgaacatacgttaacttttctataagactttggctgtttttgtgttacaatgataagcagtcaaagaggtgaataggtgtgattgaattcgtgaaggggacgattgattacgtatctccccaatacatcgtgattgaaaacggcggaatcggctatcaggtcttcactccgaatccgtttatttataaggtaagcaatcaagagaccatttttacgtatcatcatataaaagaagacgccttttctttgtacggtttttcaacccgggaagaaaaagcgcttttcacaaagctgctgaacgtcaccggcatcgggcctaaaggggcgctcgccatcctcggttccggtgatcccggagccgtcatcgaagcgatcgaacaggaagatgaagcctttttggtgaaatttccgggtgtgggcaaaaaaacggcgcggcagattattcttgatttgaaaggcaaactggccgacgtcgtgcctgaaatgattgacaacctgtttaatcatgaagcgcgcattgaaaaacaagaggctgaaacggcgcttgacgaggcgcttgaagcgctccgggttctcggctacgccgaaaaagaaattaaaaaagtgcttcctcacttaaaagaggaaacggcgctttcaacagatcaatatgtgaaaaaagcattgcaaaaattattaaagtaaggtgatgttcatggatgaacggctcgtttcaagtgaagcagacagccatgaatcaataatcgagcaaagcctcaggccgcagaatctcgcccagtatatcggccaaaagaaggtgaaagaaaatctgcgcgtgtttatcgatgcggcaaaaatgaggcaggagacactggaccacgttcttttatacgggcctccgggtctcgggaaaacaacgcttgcgtctatcgtggccaatgagatgggtgtggagatgcggacgacgtcaggtcccgccatcgaaagaccgggagatttggcagccattttgacggcgctcgaaccaggggatgtgctgtttatagacgaaattcacaggctgaaccgctcaattgaggaagtgctgtacccggcgatggaggatttctgccttgatatcgtcattggaaaaggcccgtccgcccgctccgtccgtctcgaccttcccccttttacgcttgtaggagcgacgacaagggtcggattattgaccgcaccgctcagagaccggttcggggtgctgtcgcgccttgaatactatacgcaggaagagctgacagatatcgtgtcaagaacggctgacgtttttgaagtggatatcgaaaaagctccggctctggaaatcgccagacggtcaaggggaacgccgcgggttgcaaaccggcttctcagaagggtgagggattttgcccaggtgctcggcgacagccgcatcacggaagaaatcgctcacgacgcgctcgaacgtcttcaagtcgatgcgctcggccttgaccacattgaccataagctgctgatgggcatgatcgaaaaattcagcggaggtcccgtcggccttgatacgatttccgcgacaatcggcgaagaaccgcatacaatagaggatgtgtacgaaccgtatctgctgcagatcggatttctccagaggacgccgaggggacgggtcgtgactccggctgtgtatgaacattttcgattggaggcgcccgcccgtgactgactttccgaaggttctcatggttctcggtgccgttttgcttattgccggcgcagtctggcactttgtcggaaggctgcccggagatattttcgttaagaagggaaatgttacatttttctttcccgttgtcacttgtattgtgatcagtgtgatactatccattctgcttaattttttcggcagaatgaaataacaatagacagaataaaggtgaaatgatgaaagtcgatttatttgattttgaactgcctgaacgcctcattgcccaagtgccgcttaaagagcgtgacgcatcgcggcttatggtgctcgacaaacagacgggcgggctgacggacagttcatttaaagagattgtaagcttttttaatgaaggggattgcctcgtcttgaacaatacccgtgtgctgcctgcgagattattcggcacaaaagaagatacgggagcgaaagtggagcttctgttattaaaacaggaagaaaatgatacatgggaaacgctcgtaaagccggcgaaacgcgtaaaaaaaggaacggtcctgacatttggcgacggccggctgacagcggtctgcacggaggagcttgatcatggaggcagaaaaataaaattccggtatgacgggattttttacgaagtgcttgaatcactcggtgaaatgccgctgcctccttatattaaagagcagcttgatgataaagaacggtatcagaccgtcttttcaaaagaaatcggatctgccgcagctccgacggccggacttcattttacggaagagattctggacgagctgaagcaaaagggtgtgcggattgaatttatcacacttcatgtgggactcggcacattccgcccggtcagtgcggatgatgtggaagagcataacatgcacgcggaattttatgaaatgacggaagaaaccgccgcctctttaaacgaggtcagaaaggcgggagggcgcattgtgtcggtcgggacgacatccacgcgcaccctggaaaccattgccggcgagcatgacggcgtatttaccgcttcaagcggctggacgtccatcttcatttatccgggatatgaatttaaggcgattgacggcatgatcaccaattttcatctgccgaaatcttcccttatcatgctcgtttctgcgcttgccggcagagagcatgttctttccgcctaccgtcatgcggtagaagaggaatatcgtttcttcagctttggcgacgccatgctgattatctaatttgaatgacaggaggcctcatacaaagtggctgaacaaccgatacgttatgaatttataaaggaatgcaaacaaacgggagcgcgcctgggcagagtccatacgccccacggctcctttgagacgcctgtatttatgccggtcggcacgcttgctacggtaaagacgatgtctccggacgagctgaaatctatggatgcgggcattattttaagcaatacgtaccatttatggctccgcccgggacacgacattgtaaaagaagcgggcgggcttcataagtttatgaactgggaccgcgcgattttaacggattccggcggttttcaggtcttttcattgagcaagtttcgtaatatagaagaagaaggcgttcatttccgcaatcacttaaacggagacaagctgtttttatctccggaaaaagcgatggaaattcaaaacgccctcggctctgatatcatgatggcgtttgatgagtgtccgccgtatccggcagagtatgattacatgaaacgctctgtggaacggaccagccgctgggcggaacgctgcctggaggcgcacgggcgctcagatgagcaggggctgttcggaatcgtacagggcggagaatacgaagacctgcggacacaaagtgcaaaagacttggtttcgcttgattttccgggttatgccataggcgggttatctgtcggcgagccgaagcacgtcatgaaccgagtgcttgagtttacaactccgcttttaccgaaggacaagccgagatatttaatgggtgtgggttcaccggatgctttaattgacggcgccatccgcggcgtggatatgtttgactgcgtactgccgacccggattgcccgaaacggcacggtgtttacgaatgaagggcgtctgaatatgaaaaacgccaaatatgagcgtgatttccgtccgattgacgaagagtgcagctgccatacatgcaaaaattactcccgcgcttacatcagacatttgatccgctgtaatgaaacgtttggaattcgattaacaacttaccataaccttcattttctgttacacttaatggagcaggtcagacaagccatccgggaggatcgtcttggtgatttccgagaagagttctttgagcgttacggctataataagccaaatgcgaaaagcttctaaataaaaccattcttgaaaggagggaaacagatgggtactttaggcacaatcgttcctattattttaatgtttgcagtgctttatttcctgctcatccgtccgcagcaaaagcagcagaaggccgtacgccagatgcaggaagagctgaaaaaaggggattcagtggtgacaatcggaggattgcacggcactgttgattcaattgatgaaagcaaggtcgtcattaaaacaggtgataacacccgtttaacatttgaccgccgcgcaatcagagaagcttccgctgaataacagcgaagctcatacatacaaaaaaagagcggagaatccgctctttttttattacgctgatctgcttcctttcaaattcactccgaaaatgccgcccagcatgctgactcccaaaaagccgagatgaaacaaaagctgaccggatgtaaacgtttttccgaaccctaaatattgaaacagcaagatgattaatgaaaaacagacggcggttaacgctccgatcatccagcctttttccttcgctttgccgcccgatataaaaccgcccgcaaataaagaaagaaaggaaagcgcggtgatcagccagctgaaagatgactcttccattgaggtaaccgtcagtaaaagcgaaatcgccaaactcgtaagaagcatcaccgcaaagatagccactaagccgtacaagacgcctcttcccacttgtttcgtttcttccatttttatctcctctccgccctgcggcctgatatatgacaagccggagcccgtctttttctaaatgtattctctgaatgttcgaattagacgtaaatgcatgatgttcagcccgtttcttacataattcagagccgatggcaaatgctatgaccgttggaggtgcgatatggaagatattttcattattacgtttcgtacgattgtgctttattttatcattcttgtgattttcagactgatgggaaaacgggaaatcggagaactgagcattttagaccttgtcgtctccattatgattgccgagattgccgtattggcaattgaaaatgtaaaagataagcttttgcatacgattgtgccgattgtcgttttaatgattattcaagtaagccttgcttttatttcgctcaaaagccaaaaaatacggcagctgcttgacggaaaacccaccattattataaaacagggaaaaattgatgaacgggcgatgagatcgcagcgctacaattttgacgatcttcttatgcagctgagggagaataacatcgatagaatctctgacgtgtcatacgccattttggagtcttcaggcaaactgtcgatcgtcaaaaagaaaaagaataaggataagcagatggaaacatcgcttatcgttgacggggtcattcagaacgagcatctagacagaatcgggaaagataaacactggctcgaaaaaaatttagcaaaaagaggatatcgcgatctttcggttatatcattctgcacgtttacggacggcgctttttttattgatcttaaagatgaaaaaggggagccatgaatcggtttcaccgcgtgacgaacttgccgatgaccggaatccggatcagctcttcccttttaatcagcttgaataacagaagaagcgcaatgtacaaaatcgcggtcattgcaatccagcctgtgagattaacagcctctgatcctgaaaaatgaacggcgtgcttgatgatgcggctgacatagccgcaaatgaatatgacggcaaaacagagcgcgtattcttttattttaatgctgatcggaagcaccttgcttacggtggccgcatgcagcagggtgacaagaaccatccccgttacaatcgcaagtgcggcgcccatgatgcccaaggaaggcctggtcgccaaaacaaaaattaggccagttttgacagcggcgccgataaaactgttcatcatggcggccccggctaaattgagagcctgcagcaccgcctgaaggggcccctgaaaatagtaaagcagaaaaaacggcgccatcactttaacaaataccgccgcattcgttgatccgtacatgacggacatcagttcatcagcgaaagagaataaaataaccaccgaaatgcctccgcttaaaagacacagcctcatcgcctgttccagacggtattcgacaacttgcagctttttttgctccattccttcactgatcgcaggaacaagtgccgttgacagagaataggttataaagctgggcagcgtcaaaaccgtcatggcaaatccggtcagctccccgtactggctggtggcggcagcggtggccactcctgcaatcgcaaggctttgcgcgacgacaataggttcaaaaaaccaagataaatttccgatgaagcggcttccggttgtcgggagcgacacgctcatcagctggcggaaggtttcttttccatttgcgatcgacttgaaaaattgttttctgattctgattgttttatttgctttaaaacaaatgaataaataaataagagaggcaagctccccgatgacagacgaaatcatggctccggctgcggcatattcaatcccgtacggcagaaacaccgtcgtgcagactgcgacaagtgaaatccgcacgatctgctcaagtacttgggaaaacgccagcgggttcatattctgcctgccctgaaagtaaccgcgcagcacgctggagatcgcgataatcggcacgacgggcgtaatcgccagaagcgggtaaaccgtgcgctgatccgtcagcatcgtttcggacataatcggcgcaaagcataaaaacagcggcgtgaagatgagacttaatatcccggtgacggtaagcgacatcactaaaatgtgtttcattttctgcctgtccccccgcgcgcttgcttcagcgacaagtttgctgatggcaacggggaggccgaattgagtcaaagtggtggccaagaaaaatgtcggggcagccatcatgtataaaccgaccccttcttcaccgataaaccgggcgataaccacccggttgacaaagccgagcattctcgtaatcatcccggctgcgatgagaataagagtgccccttaaaaaagtctgttttgccattttataaacccctgccttctcaaactacctggaatcatatacaataaagatatgcgccgatgtcgtccgagcatgacaagtcttcgagaaaaatggaaaaaggagcgagcgcccagtggagaaacatcccgccgaaatgtacaaagatcatttgcggcctttcttgtacagtaaacttgaagagttcaaaatcctcggatacgatgatgttgagcacgagagtttatggtcatacttaatacataaaaagtggaaacagaaaaaggaactgccgctgcatgaattggccggtcatattttatcagttaaaattggcgattttatgaactatgcaaccgttgaagcttttaagtcgtctaattggctggaaagcgatgagggtcaggaagctttagatgaactgctgagataatgatttgacggcataggtttaaggaggaaatacataatgaaaaaaggacgcttgattgcgtttttcctgatcgtattattgatcggcacagggctggggtattttacaaaaccggctgccaataatattacgttaggattggatttacgcggcgggtttgaagttctgtacgatgtgcagcccgtcaaaaaaggcgataaaatcacaaaagacgtgctcgtcagcacggtgcaggcgctgaaccgccgggctaacgttctcggcgtaagcgagccgaacattcagattgaaggaaataaccgcatccgcgtacagctggcgggcgtcacgaatcagaacagggcgcgcgaaattctgtcaacggaagcgcagctctcgttcagggatacgaatgataaagagttgttaaacggctctgatcttgtggaaaacggcgcgaagcaaacctttgatccgacgacgaacgaaccgattgtcagcgttaagctgaaggatgcggataagttcggagaagtgacgaaaaaagtcaagaaaatggcgcctaataatcagcttgtgatctggcttgattaccaaaaaggcgattcatttaaaaaagaagtcggcaaaaaacatccgaaatatgtatccgctccgaatgtgagccaggaattaaacacgaaggatgtcacgattgaaggtcagttcaccgttcaaaaagcgaaggacttggccaatattttaaacgcgggcgcgctgcctgtgaaactgaccgaaaaatactctacttcagtaggggcgcaattcggacagcaggctttgcatgatacggtagaggccggcatcatcggtattgcaattgttttcttatttatgctgctttattacagactgcctggactcatagcggtaattacgctttctgtatacgtatatattacgcttcaagtgtttgactggatgcaggcggtgctgacgcttccgggtattgcggcgctcattttgggtgtcgggatggcggttgacgccaacatcatcacctatgaacggataaaagaagaactgaaactcggcaaatccgtccgctcagctttccgttcagggaacagacggtcattcgcgacgattttcgatgcgaacattacaacgatcatcgcagcggtcgtgctctttattttcgggacaagctctgtaaaagggtttgcgacgatgctgattctgtcaattctgacaagctttattacagctgtcttcctttcaagattcctgctctcccttctcgtggaaagcagatggcttgaccggaaaaaaagctggttcggcgtcaagaaaaaacatattatggacattcaaaagacctacgaaaatactgaaccgcatacggcattccaaaaatgggatttcacgagcaagcgaaaatatttctttattttctcaagcgctgtaaccattgcgggaattatcatcttgctggtctttaagctcaacctgggaatcgattttgcaagcggcgcgcggattgacgtgcagagcaatcatgcattgacggcgcagcaggttgaaaaggactttgactctctcggcatggatccggaaaacatcgtgctctcgggtaaagagaaccatgttgccgcggcccggtttgtcggagagccatctaaagaaaaaatcgctgaaatcaaaacgtactttaaggacaaatacggatctgaaccgaacgtcagcacggtatcgccgacagtcggaaaagaactggctcgtaatgctttatatgctgtcgccattgcatcaatcggcatcattatttacgtatcaatacgtttcgagtacagaatggctgtcgccgcaattgtatccctgctgtatgacgctttctttatcatcgcgtttttcagcattacaaggctggaggtcgatgtcacctttatcgccgctattctcaccataatcggttactcgataaatgatacgatcgttacatttgaccggatacgcgagcagatgaaaaaacgcaagccgaagtcatttgccgatctggaacatatcgtgaatctgagcttgcagcaaacctttacacgttcgatcaatacggtcttgaccgttgtgattgttgtcgtcgtgctgctcattttgggctcatcgtcaattacaaacttctccgtcgctttattggtcggtttattgacgggcgtttattcctctctttacatcgccgcgcagctgtggcttgtatggaaaggtaaagaatttaaagggaaaaaatcaatcgaagagtaaagtgggaacaggctgtcttgcagaaggcagcctgtttttttaggccgcattgaacttaaaacctgcatttgctataatgacatacgcttacataatcaatcatcattgtaaaaacatgtaggagggttcttatgaacgttcgtgagtcggagcttccgggcatcggccagaaagtagaagtcattacgaaaaatcacgataaaatcagtattattcttcatgatgacggcagaaaagagctctattacttcgatgagaatgatcatgacgaatgcctggcatccgttgaatttaacgacgaagaggcgaggcagatttccgctattttaggcgggatgacgtataagccgaaagcgctggaatctgtggaagttgcgcttgatgacctcgtcattgagtggtttaaagccgaatctcatgcaccggctatcagccgtacaatcggagatttggagatcaagaaacattacaacgtccagattattgcgatcgtaaagaaaaaccggcaaaaacagctgagccccggcattgataccgtaattgaagcaggggacaccctcgtcatatcgggtgaaagaagcggactgaaaaagctggtccgcgagcagttaacggcccggatttcctgagaccggggtttactcccgggaaaatgggggaaaagataagaatgaacaattgggggcagacgcatgaataaacaatggactattatattcgctttactatttactttgattgtcgccatctttgctgtcattaacgtgcgggcggttgaggttgattatctgttcggaaccgctgaatggccgctgattttagtcattttaggctctgtgttaatgggagcgctgatcgtgttttcggccggtatctttcaagtgatgaaactgaagcgcgaaattaaaatgctgcggaaagaaaacagatccgaggctgaattgacgactgaatcggacggccaaaaaacagccgcgccgccggaagaaatgcttgaagagaaaaaaggatcagaataacatttgaaacccctcagtccgctctagtataatagggtggttgaggggtgaatttatgttagcgtcaaaaatgcgctgggaaatccagcagccggatcaggaaaaagtcaaatcactcacagaacaattggacataacacctcttgtggcatcactgcttgtaaaaagaggttttgatactgccgaaagcgcaaggctgtttttacatacaaaggatgcagacttttatgacccgtatgaattaaagggaatgcgggaagcagttgatcggataaaactggcggtttctcaaggggaaccgattatgatttacggagattacgatgcagacggcgttacaagcacgtcggtgatgctgacggcactcagacagctgtcggcggacgttgacttttatattcccgaccgtttcacagaaggctacggcccgaatgaacaagctttccgctccataaaagagcggggattttcgctgatcattacagtggatacgggaatcgccgccgtccatgaagctgaagttgcaaaagagctgggcttagacgtcattattaccgaccaccatgagccgggacccgagcttcctgacgtatttgcgatcatccacccgaagcagccgggctgcggctatccgtttaaagaattggccggcgtcggtgtggcgtttaagcttgcccacgcgcttacgggttctttgccggaagctatgctggacttggcggcaatcggtacggttgcagatctggtgcctcttcatgatgaaaacagattaattgcgtcactcggaatcaaaaggcttaggacgacaaatcggccgggcctcaaagccctgattaagctttccggcggagatatcggacaagctgatgaggaaacgatcggatttcaggtcgcgccgaggctcaatgccgtcggaagaatagaacaggccgatcccgccgtccatctgctgatgaccgaagatcagtttgaagcggaggaactggcttcggatattgaccggctgaataaagagcggcagaaaatggtgaaaaccatgaccgaagaggctgttgaaatggttcagcagcaaggcggaaacccgtctgccattgtagtggcaaaagccggctggaatccgggagtcgtcggtattgtcgcatcgaagctggctgaacgtttttaccggcccgctgttgtgcttgggatagatgaggagcagggaatcgctaaagggtcggcgcgaagcatcagaggcttcaacctgtttacgagcctttcacagtgcagagacattcttcctcatttcggcgggcatccgatggcggcaggaatgacgttgaaggctgaagatgtggcggaattaagggacaggctgaatcaaatggctgaagaaacccttacggaagaggattttattcccgttcaggaggttgatcttgtctgcggcgtagaagacataaccgttgaaagcattacagaattaaatatgctgtcgccgttcggcatgcttaaccctaaaccgcatgtgatggtgaaaaatgccgtgcttgatgatgtgcgcctgatcggagcgaataaaaaccacgtgaaaatgacagtgaaaagtgattccgccgtccttgactgcgtcggctttaacaaaggagagcttgaagccggagttgtccccggatcaacgatttccattgtcggcgagatgtccattaatgaatggaataacagaaagaagccccagctgatgattaaagacgctgcggtgccggaatggcagctttttgatatcaggggcaagcggacgtgggaagacacggtcaccgcgctgccgaaggaaaaacgggtgctcatcagctttaacgaaaaaaccgctcagaagctccgtgcaaaagagctgtcgggcgagctggccgggatcacatcggaatccgaggcggaagctctccagcttgacggaaaatatgccgtttttctggatgtgccgccgtcagcggatcacctgcagcatttgcttgacggaaagaagctggaacggatttattttgtttttatcaatcatgaagaacatttcctgtcctcatttccatctcggaatgatttcaagtggttttacgcatttctcttgaaaaggggcgcttttgacttcggcaagcatggttcagagcttgcgagacacagaggatggtcaattgacacaatcaatttcatgacaaaggtgttttttgatctcggttttgttaaaatagaagatggtgtgctgtctgtcgtgagcggcgcgaaaaaacgcgacctggcagattcgcaaacctatcaggtaaaacagcagctgatggaattagaccagaagctcaattattccgcagcccatgagctgaaggaatggctaaataagctgatgaaccaaggttcagaagcttatgaaagtacgaggaggacatagaacagatggatcttaaaaaatacgtaacaattgtgcccgattacccgaaagaaggcgtacaatttaaagatattacgacattgatggacaaaggcgacgtataccgctacgccactgaccaaattgttgaatatgcaaaagaaaaagaaattgatttagttgtcgggcctgaagcgcgcggctttattatcggctgtccggttgcatacgctctcggagtcggctttgcgccggttcggaaagaaggaaaacttccgcgtgaggtcattaaagtcgattacggtttggagtacggaaaagacgtactgacgattcataaagatgcgattctgccgggacagcgcgtgctgattactgatgacttgcttgcaacaggcggcacgatcgaagcaacaattaagctggtcgaagaactgggcggcgtcgtagccggtattgcgttcttaatcgagctttcttaccttgacggcagagacaagcttgacgattacgatattttaacattaatgaaatattaaccgcatatggaaaaaagcactcgtgtcagggtgcttttttcctattatttcatcatcctgacagattctttaggtgttttgaacttctgccctttacatctctcgtttttttcttgataataaactaatacagtttacatttaaaaaaggtgattccatggcgaacgaacaagtattgactgccgagcaagtaatagataaagcgcgcacttatctgccggaggagcagattgcgtttgttgagaaagcttacctgtatgcgcaaaacgcgcatcgcgaacagtaccgcaaatcaggtgagccgtacatcattcatccgattcaggtggcggggatcctcgtcgatctggaaatggacccttccacgattgcgggcggatttctgcatgacgtggtagaggacacggatgtcaccctcgacgacctgaaggaagcattttctgaagaagtggcgatgcttgtcgacggcgtgacgaagctcggtaaaattaagtataaatctcaagaggagcagcaggcggaaaaccatcgaaaaatgtttgtcgctatggctcaggatatcagagtcatattgatcaagctggcggatcgccttcacaatatgcggacgttaaagcatcttccgcaggaaaagcagcggagaatttcaaatgagacgctggaaattttcgctccgctggcccatcggctcgggatttctaaaatcaaatgggagctggaagacaccgctctccgttatttgaatcctcagcaatattacagaatcgtcaacctcatgaagaaaaagcgcgcggaacgcgaactttatgtcgaagaggttgtcaatgaagtgaaaaaacgggtcgaagaagtaaatatcaaagcggacttctcaggacgtccgaagcacatctacagcatttaccgcaagatggcgctgcaaaataaacagttcaatgaaatatatgatctgctcgccgtccgtattcttgtcggaagcattaaagactgctacgccgtactcggcattattcatacgtgctggaagccgatgccgggcagattcaaagattatattgcaatgcctaagccgaatatgtatcagtcactgcatacgaccgtaatcgggcctaaaggcgatccgctggaagtgcagatcagaacgtttgagatgcatgagatcgctgaatacggggtggccgcacactgggcatataaagaaggcaaggctgcaaacgaagaagcgacatttgagaaaaaactgtcctggttccgtgaaattctggaattccaaaacgagtctaccgatgcggaagaatttatggaatcgctgaaaatcgatctgttttctgacatggtatacgtatttacgccaaaaggcgatgtcattgaactgccgtcaggctctgtgccgattgatttttcctacaggatccactcggagatcggcaacaaaacaatcggggcgaaagtgaacggaaaaatggtgacgcttgaccataagctccggacgggcgacatcgtcgagattctgacgtccaagcattcatacggtccgagtcaagactgggttaaactggcgcagacgtctcaggcgaaacacaaaatccgccaattctttaagaaacagcgccgtgaagaaaacgtcgaaaaaggccgtgagcttgtcgagaaagaaattaaaaatcttgattttgaagtgaaagatgttttaacactcgaaaatcttcaaaaagttgccgacaagttcaatttctcaaatgaagaggatatgtacgcggcggtcgggtataacggcattaccgctcttcaggtggccaacaggctcaccgaaaaagaacggaagctgcgtgaccaggaagagcaggaaaaaatcgttcaggaagtcacttccgagccgaaacattatccgcaagggagaaaacgggaagcgggtgtgcgcgtaaaaggcattgacaaccttctcgtccgcttgtcgaaatgctgcaacccggtgcctggcgaccatattgtcggttttattacaaaagggcgcggtgtatccgttcaccgggatgactgtccgaatgtcaaaacgaatgaagcgcaggaacgtctgatccccgttgaatgggagcatgaatcacaggttcaaagacgcaaagaatataacgttgagattgagattttggggtatgaccgtctcgggcttttaaatgaggtgctccaagccgtaaatgaaacgaaaaccaacatctcctctgtctccggcaaatccgaccgcaataaagtcgctacgattcatatggcgatttttattcaaaacatcaatcatctgcacaaagtggtcgagcggattaagcagatcagagacatctattcagtccggcgggtaatgaactaaaaggagcttgctatgaaattagttgttcagcgtgtaacagaagcaagtgtgacggttgacggcgctgtcgccggccggatcggacccggcattatggcgcttgtcggcatcactcatgaagatacagaagaagatgccgcttacttggcggataaaatcgtgaatcttcggatttttgatgatgaaagcggtaagatgaatttatcgcttttggatacgggcggggagattttatccgtttcccagtttacgctttacggcgaaacgaagaaagggagacgcccgaattttatgaatgcggctaaaccggatcaggctgtgctcctttatgaaaagtggaacgaactccttcgggaaaaaggagtcaaagtggaaaccggaatattcggagccatgatggatgttcagctgacgaattccgggccgattacattgattatggattctaaacaataaaaaagctgccgttcggcagcttttttttatgattgaaaataatgttccaatccgctttcaattccgtctgtcactttttcctgataagagccgctatgtatgattgtttcttcctgcggttgactgagatagccgagctcatacagcatggcaggccgtttattttccctcaggacgtaataatcgccaaacagaacgccgcgatccgggatagaggaacgcttcactacttcagaatggacgtctgaggcaagctggcgatccttagacggactgtaataataagctgtgcttccccgtgttgacgtatcggcatagctgtcatagtgaatgctgataaaggcatccgcattccggtaatgagaggttgaaaccctggcctgcaggctgataaaagtatcatcctgtctggtgatatacacgtttgcaccggccgcccgcaatttttgggccagcagcttagcggttttaatggttacgtttttttcaaactttccggagtagccgatcgttccgctgtcttttcctccgtgtccgggatcaacgacgatcgtcttgtttttaagtgagccgctgccgcctgacgtgtcgggagaaggtgcttcacctgtttcctcaccgctttttgacgtttgtacaacccagtttgccacatatgcggtttgtccgttttcaagccggacttcataccatttgccgcttgagccgacaatcgggtaggctgcgcctttatctgctctttttacgatagaagcggaagtcgaggccgagctccttaagttggtgccgccgtaaacaatatacgcttttttcgaggagcctgagcccgcagaaccgtctcccgagccggatgcgctgtccgatgagtcagaatcctttatgatgtagtggcttgctgcccagcctttttgcccgtttgcttcaattttcagccagccgtggtcttcacttaagatggaaacctttgttccgcgtgataatttagtcataatcgctgaatcatgtgatgctgcacttctgacattcaatgaagaaacgccgaccgtcccgttttttgacccgcttcgggccgaagtggctttcgtatccgatcctccgctgtccgcggtgacgtattcggaagaaacccatccggttgtgccttgataagaaatgttcacccatccgctgttcttgtccagcaaggatgcatgtgcgccttgcggaagtttgccgatgacttcatatgatgtccccgggccttttctgatgcggaggtcaggatcggtggaagtgaccgttccgcttgttgcggatgaatggtctgctcccccggctgtttttgatatcagccaggaaacgacccatccggttttaccggggctcagctgaagctgcacccagtctccctcttctttagcgatcgggtatctttcccctttttttacttcagccttaattccatagctcaggccgggaccgcctctgacattgatcttgtctgtcgcgatgaccgcttctccctctgcggcgattgcggtgtggaatgacggaagaagcgctgtgatgatgacgccgcataaaataagagcaagagttctcttcttcatggctgtcctcctttctgaactaactaaaatacattcttgtataatatcgtattttccttgctgaatgttaaataaaaataaaatggtttgtttatactagtcataaatacagcgaaaaggtgtgcaaatcatgaaatatcaaccaaaaatgggacgcgcgctgcacgatgcggaaggaaatctgcacttcagtgatcagagcgatagcgaaaaggcgggttttcttgaagagacggcgacggagttcggtctcttatcgaaagaagcggtcgcaaggaaaaacagacggaataaaacttgacaggggagtgcaatcccattattataatagaaattgatgtacataagtcatgataacgattttgaaccgataatggagaagagtaggtcagaatgcatggagaagagaggaaccgtcccgggctgaaagcggatccgcactgcatctttctcgaaacaacactccggaggttccctgctgaacgcttttgcaagtcattaggcagcggacgtgaacctgcgttaaaggtcagagcggggatgcttcggcattccaactagggtggcaccacgggtataactctcgtccctactatacatgtatagtaggagcgggagtttttttatttgaagaaagacattaaggaggcctgtaacatggcatatcacattccaagaggcacacaggacatactgccgggtgaatcagacagatggcagttcgtcgaacaaattatgagggagacgtgccgcacttatcaatataaagaaatccgcacgccgattttcgagcatacggaattgttcgcaagaggcgtcggtgagtctacagatatcgtgcagaaagaaatgtacacgtttgaagaccgtaaagggagaagcctgacgcttcggccggaaggaacagccgctgcagtccgcgcgttcaatgaaaataaattatttgcgaacccggtgcagccgacgaagctttattatgtcggaccgatgttccgttacgaacgtccgcagacggggcgtttccggcaattctatcaattcggaatcgaagcgatcggctccaaagatccggccgtggatgcagaagtcattgcgcttgcgatgagtatttaccgcacagccggtttgaaacatgtcaagcttgtgttaaacagccttggtgaccaggacagccgcaaatcctaccgggaagcgctcgtcaaacattttgaaccgcgcatcggagagttttgctcagactgccagtcgcgtctgcacacaaacccgctcagaattcttgactgcaagaaagacagagagcatgaactgatgaaaacggctccgtccattcttgattacttaaatgaagaatcagccgcttattttgagaaagtaaaacaatacttaaacgatctcggcatcccgttcgaaatagatccgaaccttgtcagagggcttgattattataaccataccgcttttgaaattatgagcaatgccgaaggattcggagcgattacaacccttgccggcgggggccgctatgacgggcttgttgaacagatcggcggacctgaggcgccgggtatcggatttgcgatgagcatcgaacgtctgctggcagccattgacgctgagaaaacagagcttcccgtcaatcaggggattgactgctacatcgtgacgctcggagaaaaagcgaaggattattccgtttccctcgtgtacaaactgagagaagcgggcatctcaagtgaaatcgattatgaaaataaaaagatgaagggccaatttaaaacagctgaccgtctcggcgcacgttttattgcgattttaggggaagatgagcttgcccaaaataaaatcaatgtaaaagacgcggaaacaggagagcagcgtgaagtggtgttagacgagctgatacaagtgttaaaggcagatcaaaagcagtgaaggagaggaacgctatgtttggaagaacatattattgtggcgaaataactgaaaaagcgattggcgaaaccgtcaaactgaaagggtgggtgcagaaacggcgcgatctcggcggcttgattttcattgatttgcgcgaccgctcgggtattgtgcaagtcgtgttcaaccctgacgtatcgaaggaagcccttgccgcagcggaagcaatcagaaacgaatatgtgcttgatatcgaaggcacggtttctgcccgtgaagaaggcacgttgaatcccaacctgaaaaccggtaaaattgaaatcaaagctgaagcggtgacggtgctcagtacggcgaaaacgcctccgtttccgatcagtgaccaggcggctgacgtttctgaagacgtccggttaaaacaccgctatttggatttgcgccgcccggcgatgtttcaaacattgcaaatgcgtcaccaagtcacaaaatccatccgccatttcttggatgaaaacggatttcttgatattgaaacaccgattttaacaaaaagctctcccgaaggcgcccgtgattacttagtgccgagccgggtgcatgaaggagaattttacgcccttccgcaatcgccgcagatttttaaacagcttctgatggtgtcgggctttgaacggtattatcaagtggcccgctgcttccgcgatgaagacttgcgtgccgaccgccagccggaatttacgcagattgatatcgaaatgtcctttatgagtcaagaggacatcatggctctggcggaagagatgatggcgaaagtcatgcttgaaacaaaaggtgttgaagtaccgcttccgcttccgcgaatgacatatgaagaagcgatgaacagctacggttccgacaagcctgacacccgcttcggcatgctgctgacggacgtgtcagacatagtgaaagatactgaatttaaggtgttctcatcagccgtggcaaacggcggcgttgtaaaagcgatcaatgtcaaaggcgctgccggcgactattccagaaaagatatcgatgcgctcggcgtttttgccggaaattacggcgcgaaaggtctcgcttgggtgaaagttgaagctgacggcgtaaaaggcccgattgcgaaattctttgatgaagagaagcaggcaaaactggctgaagcacttgatgcttctgaaggcgatctgctcctgttcggcgctgataagtttgaggttgtggctcaatccttcggcgcgcttcgcttaaagctcggcaaagaacgcggcctgattgacgaaagcctcttcaacttcctgtgggttgtggactggccgttactggagcatgacgaggaagaaggccgtttctatgcggctcaccacccgtttacaatgcctgtccgtgaagatcttgacctgattgaaacggcgcctgaagatatgaaagcgcaggcttacgaccttgtcttaaacggctatgaactcggcggaggctcaatccgtatttttgaaaaagacgttcaggaaaaaatgttcgggcttctcggctttacaaaagaggaagcggaggaggagttcggataccttcttgaagcctttgaatacggcgcccctccgcacggcggaatcgcgctcggcttagaccggttggttatgcttcttgcaggccgcacaaacttaagagatacgatcgctttcccgaaaacggcaagcgcaagctgccttcttacggaagcgcccggcgaagtgagcgacgcccagcttgaagaacttcacctttctgtcaaaagaaaagtgaaacagtaaagatcagcagtttgtttcttgaaaatcaaaatctgctgtgatatgattttgacaagttaaataaagtcctgatgtgttagttgtacacctagttttgaccgaacatttttttgatttgggagcccgcatttttaaatggcgtacatgcctcttttcattcgttaagaggacttacaagatttaaaaaagggcacccacctgctgagagcgggttcaaaacgaaggaaagctgcaacggcacaattgggactttattttttgtgcgctaaaaccagcggctttttgacaagccgagtttataaaaccagaatgtggagtgaggttcttgttacatcagttttccagaaatgagctagcgattggaaaagaagggctggacacgttaaaaaacagcacggtggccgttctcggcgtcggcggagtcggttcattcgcagccgaagcattggcgaggtccggagtggggcggatcgtgcttgtcgataaagatgatgttgacattacaaacgtaaaccgccagctgcatgcgctcttgtcgacggtgggacagccgaaaacagacttgatgaaagcgcggatcgcggatattaatccggattgcgatgtcgtcgccttaaaaatgttttatacggaagagacgtatgagcagttctttgagcatccgctcgattacgtcattgacgcgtcggatacgattcattataaaattcatctgatgaaagaatgtctgaaacggaatgttccgctgatttcaagcatgggagcggcgaataaaacagacccgacacgctttcagattgctgatatttcaaaaacccataccgatccgattgccaaagttgtccgcacaaggcttcgtaaagagggcattaaaaaaggcgtacaggtcattttttctgatgaaagcccgatcgtcatccgtgaagacgtcagaaaagaagtcgggaatgatgaagcgaaaatccgaaaagcgcaaatgccgccgtcttccaacgcctgggttccgtcagtggccggtctgattatgggcggacatgttgtcatggagctcttaaaggacatcgacattaaacgggttaaagataaataaaaagaaaaacagccttcttcaggaaaggctgtttttttatttgaatccgccgtttacacgaaaggttttggccggtatcaaaaaagacaagaacacatagggtgtccttggtccggttattttttctgcttcatcagtttttcatacacttgctttatggcggcttcaaatttccccgtttgtttcggtttatagtattgcttgttttttaacggatcaggcaaatattgctgttcgacccatccgttctcgaaatcatgtggatattgatagccgatcccgcgtccgagctcttgggcccctttatagtgggcgtcttttaaatgtttcggcacatcgccgattttacccgtcctgatgtctttgagcgcctcatcaacggctgagatggcggagtttgattttggcgagaggcataattcgattaccgcattggccagcggaattctcgcttccggaaagccgatccgttctgcggtctgaatcgcgctcagcacccgggggcctgcctgcgggcttgcgaggccgatatcttcataggcgatcacgagaagccttcttgatatgctttcaaggtcgccggcttcgatcagacgggccagataatgaagggcggcgtttgcgtccgagcctcggatcgatttttggaaggcggataagacgtcataatgcgcatcgccgtttttatcatgagtatagctttttttctgcagacattcttccgccgtctcccgtgtaatccggatcgtgccgtcgcttgattcctttgtggagagcacggcaagctccagtgcgttcaaagcggagcggacgtctcctccgcacccttgcgcgaaatgatccatcgcgtcgtcgtccaccgaaacgctgtaggaaccgagtccccggtgttcatctgtgagcgctctttccaatgcctgcttgatcagatcgggtgttaacggttcaagctcgaagatctgggtccggcttctgatggccgggttaatggcatgataagggttggcggtcgtcgcgccgattaaaataatcatgccgttttctaaatagggcagcagaaaatcctgctttcccttatcaagcctgtgcacttcgtcaaggattaaaatgacctggcctgacattttcgcttcctgtacgacaatctccatgtcttttttattatgaatgacggcattcaatttcctgaatgcgatgcttgtcgatcctgcgatcgctgtggcgatggacgtttttccgatgcccggcggcccgtacaggatcatggatgataagtgctttgcacgcaccattctgccgatgattttatcttctttgaccaaatgttcctggccgataatgtcttcgatattggcaggccgcatccgatacgccaatggtttcatgaacatctctccttacatatacagggtaacggaaaacggacgattagaaaagcgaattgcggcgggccccgtgtttcaatgaaaattaggataagttatgttataataacagttggtctataagatactaaacagattattcatatccatttacttgtataaattaacaattagaattgactggggtgttcatattgaaaatatcgacaaagggaagatacgggctcaccattatgattgaattggcgaaaaagcacggagacggtccgacgtcgctcaaaagcatcgcccaaacaaacagcctttctgagcattacttggaacagcttgtatcaccgctcagaaacgccggactcgtaaaaagcatcagaggcgcttacggggggtacgtactcgggggccagcctgaagagataacggccggagatattatcagagtgctggaagggccgatcagcccggtagaagtgcttgaggatgaagagcctgccaagcgggagttatggatccgcatccgcgacgctgtaaaagacgtgctggacagcacgacgttagaagaccttgcgagctacacggacggcgagcaggaagcttatatgttctatatttaaaccagaggtgtacagacaatggaacggatttatttagatcatgccgcgacttccccgatggatgagcgtgtgctcgaagagatgaagccccatttcttcggcagtttcggcaacccgtcaagcattcattcattcgggagagaatcccggaaatgggtcgatgaagcgagagcggacatcgcgcgcgaaatcagtgcgaaagaacaggaaattattttcacaagcggcggcacggaggctgataatttagcgattttcggaacggctgccgcccggaagaatgaaggaaagcatatcattacgaccgctgttgagcatcatgctgtattgcacgcctgcgaaaagctggaagaagacggctttgaggtgacatacctcatccccggcccttcaggacagatcagtgcaaatcaggtgaaagaagcgctccgtgatgatacaatccttgttaccgtcatgtatggcaataacgaagtcggaaccattcagccgattgacgaaatcggagagctgttaagcgggcatcaggcctattttcacacagatgccgtccaggcattcggttatatgccgattgacgtgaaaaaaagcagaattgacatgctgtctgtttccggtcacaagcttaacggacctaaagggacaggctttttatatgtaaatcaagaggtgaagctgtcaccgattcttctcgggggagagcaggaacgaaagcgccgcgcggggacggaaaatgtaccgggcatcgccggcttaaaagaagcggtcgtcctttcaaaccgtgagagggaagagaaaacagcgaagtataaggagtttaagaatattatcatgagcacgctggaaaaatccggcgtcacagcggaggtgaacggagatgccgagaaatgcctgcctcatattttaaacctttactttcccggtgtgccggtggaagcgctgctggtcaatcttgacatggaaggcgttgccgtctccagcggatctgcttgtacggcaggatccgttcttccgtcccatgtgcttacagccatgttcggaagtgagagcggcaggctgacttcgtcaatccgcctcagcttcggcctcggcaatacggcggaacaaatcgaaacagccgccgaaaagcttgccgccgtcgttaaacggcttgcttaaaacggcggacttacgtttttaatggagtgaatgcaaatggaaaaacggccggaggatacaagagtcgtagtcggcatgtccggcggcgtggactcttccgtggcggcccttctgctgaaggagcagggctacgatgtaatcggaatctttatgaaaaactgggatgatacggacgaaaacggtttttgcacggcgacggaagattatgaagacgtcatccgggtctgcaaccagatcggaattccgtattatgccgtcaattttgagaagcaatattgggaaaaggtatttcaatatttccttgatgaatataaagccggaagaacccccaatccggatgtcatgtgcaataaagaaattaagtttaaggctttcttggatcatgctctgtcactcggcgcggattatcttgcgacgggccattacgcccgcgtggacagaagcgcaggtacagtgcgcatgctccgcggtctggacgaaaacaaggaccagacttattttctgaatcagctcaatcaggaacagctcagcaaagtcatgttcccgatcggtgatctgcaaaaaagccgcgtgcgggaaatcgccaaagaagcggaacttgcgacagctgcgaaaaaagacagcacgggaatctgctttatcggcgaacgcaacttcaaaacgtttctcagccaatatctccccgctcagccgggcgatatgatgacaatggacggagaagtaaaagggcgtcatgacggtctgatgtattatactatcggacagcgccacggtcttggaatcggcggaagcggcgagccgtggttcgccgtcggtaaagatcttgaaaaaaacattctgtatgttgatcaaggattccataatccgcttctgtattctgacaagatcacggcgacaaatgtcagctggacgcgtcccgttctgatggacggcggcgaaatgacatgcacggcgaaattccgctaccgtcaggaagatcacaaagtaacggtgaaaatgacgggtgatgatgaagcggaagtcatttttgacgggcaggtacgcgccgttacgccgggacaagccgtcgttttttatgacggagaagagtgcctcggcggcggaacgatagatgacgtttataaagacggaacaaaactgtggtacgtataacacatgtaaaaaacctcaactcgcatgttggggttttttagcgaaaggaagttaaaaatggattataataaaatcgggattgacgccatgcaggagggcgattttgaaaaagcggcagaggcttttacgaaagcgattgaggaaaacggccaagatccggtgccgtatatcaacttcgcaaatctgctttcttctgtgaacgaactcgaacgggcgcttgcattctataacagagcgcttgaattggacaattcggcggcagccgcttattacggtgcgggaaacgtatatgtgatgaaagaatcgttttccgaagcgaaggatatgtttgaaaaagcgcttcgctccggaatggaaaacggagatttgttttatatgctggggaccgttctcgttaaattagagcggccgaagcttgcactgccatatttgcagcgtgccgttgaattaaatgaaaatgacacggaagcacgcttccagttcggaatgtgcctcgcaaacgaagaaatgctggatgaagctctggcgcagtttgagacggtgatcgagcaggacccaagccacgcggacgcattttataatgccggggtcgcttacgcgtacaaagaaaatcgtgaaaaggcgcttgagatgctggaaggcgcaatcggcatacagcctgatcatatgcttgcgcttcatgcgaaacagcttatcacccagtcataacaaaaggagggaaggctcgtggatcagctgaacatcgaagaacagccgtatgtaaaaggcgtcattcatacggtcatttatcataatgacaccaacctgtatacagtgctgaaagtcaaggttgcagaaacgtctgaggcgatcgaagacaaggtcgtatccgtaacgggctacttccctctgctgcaagaagatgagacctacacattttacggaaaaaccgccacgcatcctaagttcggcctgcaatttcaggctgaacactttaaaaaagaaattccgaccacaaaagaagggatcattcactatttatcaagtgatctgtttgaaggaatcggaaaaaaaacggcggaagaaatcgtcaaaaagctcggagacggcgcgctcaataaaattctgacggatgcatcggtgctttacgatgtgccgaaaatgtcgaaaaagaaagcggataagcttgccggagagctgcagcggcatcaggggcttgagcagattatgatctctctgaaccaatacggtttcgggccccagctatccatgaaaatatatcaggcctacgaaacggaaacactggagaaaattcaggaaaatccttatcagcttgtaaaagacgttgaaggcatcggctttgtgaaagctgacgagctgggcggaaaaatgggtctgtcaggaaaccacccggagcggatcaaagcggctatcttatatacaattgaatcgacctgtctttcagagggccatacgtacatagaaacaaagcagctgataatcaatacgcaaacgctcctgaatcagtcagctgaaggcggccgcgtcacggaaatggatgcggctgacggcatcatcgccctcggggagagtaaggatatcgtcatagaaggagaacgctgctattttccgtccttgtattacgccgaacaaaatgtcgcaaaacgcgtgctcgacattgcggctcaaacggagtatgccgatcaatttcctgaatcggaatttctgcttgcactcggtgaactggaagaacggatgaatgttcaatacgcgccaagccaaaaggatgccattcaaaaagcgctgtcttcaccgatgcttttactgaccggaggacccgggacggggaaaacgaccgttattaaaggaatcgtggaattatacagtgaactgcacggagtatcgcttgaccccggtgattataaaaaagacgagacgttcccggtgctgcttgccgcgccgacgggaagagccgcaaaacggatgagcgaatctacgggtctgccggctgttacgatacacaggctgctcggctggaatggcgctgaaggctttacctacaatgaagatcagccgatagaagggaaactgatcattatagacgaagcgagtatgctcgatatctggctcgccagccatttgtttaaggcgcttcctaagcacattcagctcattgtcgtcggtgatgaagaccagcttccttcagtaggaccggggcaggtgctcagagaccttttggcttctgaggtgctgccgaccgtgcgcctgacagatatttaccgtcaggctgaaggatcatccattgtggaacttgcgcatgatatgaaaaaaggactgcttccaaaggggctgaccgcgccgacaaaggaccgctcatttatccgctgtaattcttcacagattaaagaagtcgtagatcaggtcgtctcgaacgcgttaaaaaaggggtatacctccagggatattcaagtgctggccccgatgtacaggggaaaagcgggaattaacgagctgaatatgcttcttcaagacatcatgaatccgccgaaagaaaaaaggcgggagctgaaattcggtgatgtcgtctacaggacgggcgataaaatattacagcttgtcaaccagccggaaaacaatgtgtttaacggcgatatcggcgaaatcgtatccattttttatgccaaagaaaatacggaaaaagaagacatggtcgtcgtctcgtttgacggcaatgaaatcacctttacgaaaaaggatttcagccagtttacccacgcgtactgctgttccattcataagtcgcaggggagcgaattcccgattgtcgtcctgcctgtcgtcaaaggctactatcgaatgctcaggagaaatctgctttataccgccattacaagggcgaaaaaatttctgattctttgcggagaagaagaagcgcttgaatggggcgtcaaaaacaatgatgccaccgtcagacagacgtcgcttaaaaacaggctcacagagcagactgaagagatggatgcagaactggccgccctgcaaaaagagctgccgttcagtgtatatgatgcaaacatcggaatggaaggcatcacgccgtttgactttatggaagaaaaagcgtaataaaacccggagcataaacatgcgccgggttttcgcctgtggaagtcatttcaaagtatgctgcccggcttcttggcaaaacctatacgtgttcaacaaaaggtggttgatcacactttgagaacatgccatgcagctgaaggacgaacagtatatgacgaaaacaccgggtgcagtctcgggatgatatcggatgtatgtttctctctggacggccggtttctcggtttcgtgctggagcagaaacgcctgtttcacaaccgtcatctttttttagaggcaagtgatataaaagagatggatcaagaagccgtagctgccggtcatgctcatttgcagcctttgccgaagagctgtttcacctttgaacagattaagatgcagccggtgaaatcgcctgatggtgaaatgttcggtttgctggaagatgtatacttttgtttggacaggggcataatcgtagcatatgaactctcggacggcttcttttcagatctggccggcagacgccaagtgcgccgcgccgccgatacgcttattgaagcggggaaagaaggcatcgtcctgaacggataagaggtgtagtctgtgcttgtatgtccgaactgcaaaagtaaagatatcggcaaaatcggcgtaaaccaatactattgctggggctgcttcattgagctgacggtggccaaaggcaaaattgcgacacatcaagtagaggaagacggcacattaagcagtcttgatgatttgttttctgaagacgaacgcagtatcaatttttaaagttgaaaggagatacgcgcgatgggcagaacaatgacctctctgttggctttaggagctggagccgttatgtatcgtatggcttctcaatccgatatgctgaataaaaaaggtatgaaacggatgagaagacgagtcatgaaaatgttttaagcagaaaaaaggatacttctccggaagtatcctttttacgtttgtctcgcttccagccgtctggctgcgagagacaggctgtaattgaccgcgaaatacatcagggccgccagcagaaagatcgggaaaaaataccctccgtcagcgctttgtccgtttaagatctgcgcgttatgaatcagttcgggcagagcgatgacgaccgcaagtgacgtatcctttaataaagaaataaactggctcacaatcggaggaaccatacgcctgagcgcctgcggcatgacgacgagaaaaagagtctgcgtgtacgtcagtcctgaagaacgcgccgcttcaatctgtcctttgtcaacggattgcaaaccgcttctgatgatttctgacagcatggccgattcaaaaatcgtcagcgccgtaatggcggccgcggtaatttccagtttgatcccgatttccggaagggcaaaaaacgtaaagaaaatgattaataacagcggcaggttgcggatggtttccacaatggccgctataatgcccgagacgataggaattttcgcatagcgcaaagtgccggcggcaagcccgaaaataaaactcaggacaatggagatcagtgcaacataaagtgtgaccaaaaagccgtcccataaaaacagcagatggtcaggtgtataggcgccgctaaaatccatgtttttcactctccttctctaataactctttccgagacgtctttccaaatagtgaaccccgatgctgagcgggatcgttactatcaaataaaaaagcgcgacgaaaatatagacatcaaacacgacaagagtgcttgaggaaacgagatccgcctgatacatcaaatcgagtcccgccaccactccgagtattgatgagtttttgacaaggttgagaaattggtttccgagcgggggaatcacgatttttacggcctgaggaagaatgatatatctcatcgcctgactgtaggtgaagcctgacgatctggccgcttccatctgccctttggagacagtctgaattccggctctgatggcttctgcgataaaggcggatgtgtaaatcgtcagcgcaatcgttcccgcctgaaagccgtccagtctcagcccggcgttgggaagtccgaaataaaaaacgaatgtgatgaggagaagcgggatgttgcggataaattccacatacgcagtgccgatccattgaaggggtttgaaagccgtgattctcatgactgcgatcagaacgcccagcgcaaagctgcctgccagcgcgatgaagctcgcaagcaatgtgtgcaggaaaccgtccatatacatatcgaagttttccgttaaaattgaaaagttcatctatgtcactccttataaaacggggatgagcatgcctgctcatcccgcgatcctttctattttgccggttcttctttaatccattttttatagattttttcgtacctgccgtcggctttcatttttttcaaagaggcgttgatttccttgatgagtccggattggccttttttgacggcgattccgtaaggttcatcggtgaaggtttcgcctgtcagctgatattgtttattttcatctgccatgccgtataaaatcgcattatcggttgtgagcgcatctccctgtcccgctttaagcgcagtgaacgcttcggcgtaattttcaaattccagcactgaggcgtcaggcgctttttctctgatgttttgtgaggaagtagagccttttaccgccaatacttttgagccttttcccaggtctttggtgcttttgatgctgcttccttttttgacgagcagggattgcccggcttcaaaataaacatctgagaaatcaacttcttttttccgctcattcgttatcgtcatcgtggcggtgatagcgtcgatatcgccgttttgcagcatcggaattctcgtttttgacgttacttctttaaattccgctttcttctcatcccccagaatatcttttgcgagctgttttgagatatcaatatcgaagccttcaatatcaccggagcttgggtttttcagcccgaataacctcgtgtcggttttgacgccgaagatgattttgtctctgtctttaatagaggctaacgtgtcttttcccgttccttttgaatctccggacgtttctttccctccgcaggcggccagcataaagacggccagcagtgatatcaatccgaatgacagccattttgttacgcgtgacataagcgctcctccgtttcttttcagtgatttaaaatacggcttaagaataaacgcgccctctcttcacgggggctttcgtaaaattcagccggtgcagcttcttctaagatggctccgccgtcgataaacacgatgcggtccgccacttcttttgcgaatcccatttcatgtgtgacgactgccatggtcatgccttcctttgcgagtgttttcatgacatccagcacttccccgatcatttccggatcaagcgcagatgtgggttcatcaaacagcataatttcgggcttcatcgcaagccccctggcgatggcgacacgctgctgctggccgcccgaaagctgtgaaggataagcgtccgctttttccggtataccgacttttttcaaatagtataaggccgtttcttttgcttcttcttttgattgcttaagcactttgatcggtgcgagcatgatgttttgcagaacggttttgtgcgggtacagatgaaaatgctggaacaccatgccgatattgcggcggaccttatttatatccgttttcttgtcatggatggagacgccgtttaccgttaaggcgcctccatcaactgtttccagctgattaatgcagcggagaagcgtgctttttcccgatcctgaaggtccgatgataacgacgacttccccttttttaatgtgcagattaatgtttttcagcacgtggaaatgtccgtagtgcttatttacatcctgaaatgaaatcatggccatcctccttaaaaaacatgagtcattttgactggacagttttaaaaccctttaacacattacgatagttatacagatttttatgaatattatttagattatttcgtaatttctgataattgtttccgtcaagaggtctgcgtcataaggcggagtttatgaaacgggaataattccggctttctgtcaaaagataaagcaagaggtgaaacgtcatgcttcaaaaaccgctgcagctcttaatgtggacggctgtatgtctgctcgttttgttaacagtgtatgtcttttgcatgctcgatatgttatggtctcccatttggcttgttataaaatctctctttattcctatattcatcgcagtatttattgcttatcttttacttccgattactgaatggcttcataaaaaggggatgcctagaactttaagcctgcttctgatttattgcctgtttttcggcggaatcggctggggggtttataaaggggttcctgttttaattgaacagctgcaggatctgtctgagagcattcccggtcttgccaaaaactacaacagcatgctgaagcatctgcataatcacacggatcattggcctgacggcatgcaccatcgaatggacaaaatgattcagcagacagaaacgtttcttgccggcacgattgaaagcacgatcagaagcatccgtttcgtgcttgattatatcctgatcgcggcgacgattccttttctcgtgttctatatggtgaaggatatagacggcatgaaaaagacagtctggtatttgacgccgaagtcctggagaaaaagggggagtgaatttctgcgggatgtggacgactctctcggtgattacatccgcggtcagcttctcgtttgttttttgctcgggctaatagccggcgtttcattttggctgttcgggcttccttacccgctgattttgggccttgccatcggggttacgaatgtcatcccgtatttcggtccgtttatcggcgctgtgccggcgctgctcctttcgctggcgatttctgctaaagctgtgatcatcgtaatcgtcacgatttttattctgcaatttatagaaggaaacattttgagcccgcttattgtcgggcgcagtctcagaatgcaccccgtcgtgatcatgctggcgctccttgccggaggagagctcgcgggcatacccggcatgattctcgctgttccggcggcagccattttaaaagtgacggccatacactttttgcggatcaggacggaacattgacattcgggttctgcttgtctataatttcgagtagaatacatacgaatctcgagtgacggatatgagtacgccgaagccctgtttaagagagaagctccgatacgctgaaaggagcttcagcagaagatcggccgaagctaatcctgagtgcagttaaaggctgccgcagtcctgcgttacgggatgaaaggtgacaggcctttttcggcctgtaatcagggtggtaccgcgagacagctctcgtccctgtgtgaacgcatggtttgcatagggagagagcttttttgctgtcgcaaaagagaatttcgggtagtgataaggaggaatatagatgaaacacttaacttctgctgaagtgcgtcaaatgtttttagatttctttaaagaaaaaggccatgccgttgaaccgagcgcctcattggttccgcatgaagatccgtctttattatggatcaacagcggcgttgcgacgctgaaaaaatactttgacggccgcgttgtgccggagaatccgagaattgtaaacgcgcaaaaatcaatccgaacaaatgatattgaaaatgtggggaaaacggcgcgccaccacacgttctttgagatgctcggaaacttttccatcggtgattattttaaagaagaagcgatcacgtgggcatgggagtttttaacgagcgaaaagtggatcggctttgatccggagctgctgtctgtaacggttcaccctgaggatgaagaagcttatacgctatgggcggaaaaaatcggcgttccggaagaaagaatcatccgtctggaagggaacttctgggatatcggcgaaggcccgagcggaccgaatacggaaattttctatgaccgcggcgagaaatacggcaatgacccgtcagattctgaattgtatccgggcggcgaaaatgatcgttatcttgaagtatggaacctggtattctcagagttcaaccacaacccggacggcacgtacacaccgcttccgaagaaaaacattgatacgggcatggggcttgaacggatggtctccgtgattcaggatgtcccgacaaactttgacactgatttgtttatgccgattattgaagcaacagagcgcatttccggagatgcttacggaaaggatgcagtgaaggatacggcctttaaagtgatcgccgatcatatcagaacggtcgcatttgcggtaagcgacggggcgctgccttcgaacgaagggcgcgggtatgtactgagacgccttttgcgccgggcagtgcgatacgcgaaaaccatcggtatcagccgtccgtttatgtacgaactggtgccgactgttgcaggaattatggacgctttctatccggaggtgaaagaaaagcaagagtttatcgccaaagtcatcaaaacggaggaagagcgcttccacgaaacattaaacgaaggtctggccattttatccgacgtgataaagaaagagaaggaaaaaggcagcggcatcatctccggaaaagacgtattcaaactgtacgatacgtacggattcccggttgaattgacggaggaatacgcggaagatgagcaaatgacggttgaccataaaggctttgaagccgaaatggaaaaacagcgtgaacgggcgagaaatgcgcgccaagatgtaggaagcatgcaggttcagggcggcgcattgcgcgacattaccgcagaaagcacatttgtcggctacagtgccgtaaaagctgaagcgaaggtgatcgagcttcttcatgacgggcaattaatcagtgaggcgcatgaaggggataccgtccaaatccttcttgacaaaacgcctttctatgctgaaagcggcggacagatcggtgacagaggagtgctgagaagcgagcaggctgtcgtaaccattaaagacgtgaaaaaagctccgaacggtcagcatgtacacgaaggcacggtggctagcggcacgattcaaaaaggcgcaagcgtgacggctgaagttgaagatcaaatgagaagcggcgtggtgaaaaaccatacggctacccaccttctgcaccaggcgctgaaagacgttctcggcacacatgtcaaccaagcgggttcactcgttaccgaaaaccgtctgcgttttgacttctctcatttcggtcaagtgacgaaagaagaacttgaacgcattgaaggaatcgtcaacgaaaaaatctgggagagcattccggtagcgattgatttgaaaccgatcaatgaagcgaaagaaatgggcgcgatggccctgttcggcgagaaatacggcgatatcgtccgcgtcgtacaagtcggagattacagccttgagctttgcggcggatgccatgtcacgaatacggctgaaatcggcctgtttaaaatcgtatccgaatcagggatcggcgcagggacgcgaagaattgaagccgtaacaggaaaaggcgcttatcaggaaatgaacagccagctcagccttctgcagcacgctgcggacgagctgaaatcaaacgtaaaagacgtaccgaagcgaattcagtctcttcaagcggagctgaaggaagcgcaaagagaaaatgaatcattgctcagcaaactcggcaatgtggaagccggagccattctgtctaaagtaaaagacatcggcggcgtaaaagtgctggctgaaaaagtaaatgcgaaagacatgaaccaccttcgcactatggtggatgatctgaaagcgaagctcggttctgcggtcatcattctcggcgccgtgcaaaatgagaaagtcaacctttcagcaggcgtgacgaaagacctgattgaaaaaggtcttcatgccggcaaaatggtcaaacaagcggctgaagtctgcggaggcggaggcggaggccgtccggacatggcgcaggccggcggaaagcagcctgaaaaattggaagaggcgctcgcatctgcggaagattggataaaatccgttttataatcctttcaactagtgtagaatgatgataagatgaggacctcaggctgaactttgcctgcgaatttgggaaagaggtgcaaaacggtgagctcgtttgataaaacgatgaaatttaatttctccgatgactctgctgaaacaaacgtcgaagaagtgctgattacggtatatgatgcgcttcaggaaaaggggtacaatcctatcaaccagattgtcggatacttgctgtctggagaccctgcatacattcctaggcatcgcgacgcccggaacttaattcgcaaactggaacgtgacgaattaatcgaggaattggtaaaatcctatctagaacagcataaagaggcgtaaatacattcatgagaatattgggacttgatcttggaacgaaaacactcggcgtagctttaagcgatgaaatgggctggaccgctcaaggcattgagacgataaaaataaacgaggctgaaggagattacggtctggaccgtttatccgagctgatgaaagactataatgtagagaagatcgtgctcggttttccgaaaaacatgaacgggacgatcggtccgagaggcgaagccagccaaacatttgcgaaactgcttgaaacagcgtacaatgtccctgttgtgctgtgggacgagcgtctgacgacgatggcggctgaaaaaatgctgatcgcggctgacgtcagcaggcaaaaacgaaaaaaagtcattgataaaatggcggctgtcatgatccttcaaggatatctggacagtttaaactaagaggtgaaaaaaatggaacacggcgaaaaacacattacaattgtcgatgatcaaggcaacgaacagctttgcgaagtgctgttcacatttgaaaacgacacattcaacaaatcttacgtactttattatccgattgatgctcaagacgatgatgaaatcgaaattcacgcttcaagcttcgaaccgaacgaaaacggtgaagacggcgaattgatgccgattgaaaccgatgaagagtgggaaatgatcgaagaaacgctcaacacgtttttagcggaagaagacgaagaataaaatgaacggaaaaagccggagcgcatatgcgcttcggcttttttttgtaataaattgccgaatgcacatgaatcatgtagtataagagctgttgggaggaaaatacttgtatgaatatcaatcagactaaacattcatttccgcgtaaaaacaaaaaaacgacgataatactgtcctccgtgatcgctctgcttatcatcatttgcggtgcttttttctatggaaaatctctgctgtctccggttgacaaaggcagcaaaacggcagtcaatattaatattccgagcggttcttccgtttcggcaatcgctgaaattcttgaggatcagcatgtcatcaaaagcaaaaaagcatttcagctgtatgtgaagtataaaggcgcttccgggtttcaggcgggattttaccacctgaataaaggaatggatgcggatgcgattatcaaaaaactgaccgcgggatcaacgggatatgcttttcagatctccgttcctgaaggaaaacagcttacgcagattgcagaggcgatcgcaaaagaaacatcatattctaaagaagagatcatggcgaaactggatgacaaaacattcatcggcaaactgaagaaacagtttcctgatacgataacggacgcgctttcaaacaagaagctcaagcatccgctagaaggctatctgtatccggccacatatccgtttaatgatccggatgcatcgcttgacacgattttgacggcaatggttcaggaaacaaacgcccgtatcgaaacgtataaatctgaactggaaaaaaagaaactttccgttcataacgcgctgacaatggcatcgctaattgaagaagaagccaccgccaaagctgaccgtcacaaaatcgccagcgttttttacaacaggctcgaagaaaaaatgccgctgcagactgacccgacggtattatatgcggccggtaagcataaaagccgggtctactacaaagacctgaaaattgattctccgtttaatacgtataaacataaggggctgccgccgggaccgattgcaaatgccggtgattcatcatgggaagcggctctccgccctgacaaaacggattatctctatttccttgcaaaatcaaacggcgaggttgttttcaccaaaacattaaaagaccataataaagcgaaggaaaagtatatttccaaaaaagacagcgaataaaaggagggcaaaagctctccttttattccattctgaaaggttttatgataaaatatatcgggttgtttacttatggataaagaagtgtcttaagagagtgtccccgcggattcgtcaggggcactcctttttagaacggaggctgtttgccgtgaatgatcggtatgaacaaataaacgagtatataaacgcgatgctgaagcctcggcctgataaagtgaaaaagcttgaagcctatgcaaaagagcaccatgttccgattatggaagaagcgggcattgaagtgctgcttcaaatgctgtcgattcaacaggcgaaaaacattttggaaatcggcgcggcaatcggatattccgccatacggatggcgcttgagcttccgggtgcgaatatttacacgattgaacgggacgacaaacgctatgaagaagctgtgaacaatataaaagactttgaaatggaaaaccggattcacgtaatgcacggggatgcgctggaactttctgagtctgtccgtgtcacggctccttatgatgccatttttatcgacgcggccaaaggccagtacacgaacttttttgagctctatgaaccgatgcttgcgccggatggagtcatttttacggacaatgttctgtttaaagggctggtggcgcaaaatcactcggacattgagccgaaaagaagacggaagcttgttgaaaaaattgatcaatataaccaatggctgatgaaccggcctgactatcaaacggtcatactgccggtcggagacggcatcgccatcagtaaaaagaagaggtgaatgatcatgaaaaaacctgaacttttggtgactccgacttctgtacaggatattcttccgctcattcaagcgggcgcaacggccctgttagtcggagaacagagatacggcctgagactggccggtgaattttcaagagaagatataaaagaagccgtaaagacagctcatcaggaaggcgcgaaagtgtacgccgccgtcaatgctatttttcacaacgaaaaagtggacgagctgaacggctatcttgcctttttgcaggaggccggcgttgatgcggctgttttcggtgatccggccgttttaatggcggcgcgtgaagcggctcccgagcttaaactgcactggagcacggaaacaacgggaaccaactactactcctgcaattactggggacgcaaaggcgcacggcgggcagtgctggctaaggaattaaatatggacagcatcattgacataaaagaaaacgccgaagtggaaattgaaattcaaatccacggcatgacgtgcatgttccaatcgaagcgttctttagtgggccattactttgaataccagggtaaagtcatggacatcgaacagaagaaaaaagaagcggggatgtttctgcatgacaaagaacggggcaataaatacccgatttttgaagatgaaaacggcacgcacatcatgagcccgaacgatgtgtgcatgattgatgaattagaggacctgatggacgccggcatcgattctttcaaaatcgacggagttttgaagtctcctgaatacttaactgaagtgacccgcatgtacagagaagcaatcgatctgtgcttcgaaagccgggagacatacgaagagaaaaaagagagctggatagagcggattgaaagcattcagcctgtgaacagaagcatcgacacaggattcttctttaaagaaacggtctattaaaaaggagggtgcaacggatgacagccgtaaatcaaaccatttccaaagtcgtaaacggaaaacgcgtcattacgaaaaaacctgaactccttgctccggcaggaaaccttgaaaaattaaaaattgccgttcattacggagcggacgcggtttttatcggaggacaggaatacggactccgctcaaatgcggataacttctcaatagaagaaatcgcagagggcgtagaatttgctgaaaaatacggggcaaaaatatatgtgacaacaaacatttttgcccataatgaaaatatggacggtctggaagaatacttaaaagcgttgggagacgcaaaagttgccggaattatcgtcgctgatccgctgattattgaaacatgccggagagtggccccggacgtagaaattcacctcagtacacagcagtccctttccaactggaaagcggtgcagttctggaaagaagaagggcttgaccgcgtggtgcttgcccgtgaaacgagcggactggaaattaaagaaatgaaggaaaaggtggatattgaaattgaaacctttgtccacggcgccatgtgtatcgcttattcaggccgatgcgtgctgagcaatcacatgacggcccgggattccaaccgcggcggctgctgtcaatcctgccgctgggattatgacctgtatcagacagacggtgcaaacgcggtcgcgctctatgacgaagaagacgctccgtttgcgatgagcccgaaagatttaaaattaattgaatccattccgcaaatgatcgagatgggcatcgacagcctgaaaattgaaggccggatgaaatcgattcattacgttgcgacggttgtcagcgtgtatcgcaaagtcatcgacgcatactgcgctgatcctgaaaactttgtcattcaaaaagaatggctggatgagctggacaaatgtgcaaaccgggataccgcgcctgctttctttgaaggcacgcccgggtatgaagagcagatgttcggcgaacacggaaagaaaacaacatttgattttgccggtctcgtgctcgcgtataacgaggaaactcaaatggtgacgctccagcagcgcaatttctttaaacaaggtgacgaagtggaatttttcggtcctgaaatcgacaatttcacattcacaatcggcactatttgggacgaagacggaaacgagcttgatgctgcccgccatcccctgcaaatcgttacatttaaagtagacaaaaagatttatccgagcaacatgatgagaaaggggaagtaatcaccaatgggtaagagtcctgtagttataggcatcgcaggaggttccggatcaggaaaaacaagcgtcacccgttccatctatgaacagtttaaaggacactcgattttaatgatccagcaagacctttattataaagaccaaagccatcttccgtttgaagaaaggctgaacacaaactatgatcacccgctcgcatttgataatgactatttaatcgagcatattcaggagcttttgaattaccggccgatagaaaagccgatttatgattataaactgcatacgcgttctgaggaaaccattccggttgagccgaaggatgtcattattctggaaggcattctcgttctcgaagataaaagacttcgcgacctcatggatatgaaactttatgtcgacacggacgcggatctccgtatcatcagacggattatgagagatattaacgaaagaggccgttcaatcgattctgtcattgagcagtatgtgtccgtcgtcagaccgatgcacaatcagtttgttgaaccgacgaaacgctacgcggacatcattattccggaaggcggacaaaaccacgtcgcaattgatctgatggtcacgaagattcaaacgatccttgaaaaaaacttgatataaaagggttgtgggcatgcgtatcagctttataaaatgcgcatgcccacaatttgcccacgttttttaaaagatttcattcgccatagcgttaaattggacgatagatgcagtttttttatctttcatgatatgcgaataaatgtcgagcgttgtttttgcagaggaatgtcctaggcgtctttgagcttctttaatatcaatcccagcatcaatcatcaaagctgtatatgtgtgtcttaaattatgcggagtgatttttttcactcctgctttttttatataagtggccattcgataattgaagtttcttgccggttcgggctgacctgtatgatcagcgaaaacaaagtcttcatcaacgtaattgcctcgtttctcctcttttattcgttcttgtacatgcttcaaaacacgtaattgattaatgacttgaggcggaaccggtacgttacggatagatgattgagttttaggcggcatcattttatatttccctcttaacccattcttttggaacaaagtgaatctgacccggataatagactcttcaaagtcaattttgtcccatttgagggccacagcttcgccgatacgcaaaccggaatacaccagtagcaaaaacatcgctaaatcttgaggcctccctttccgttttacagcgttcagatatgctgttatctcctccttttcccaaaattttatatctgcaagatcttcatcaacttgttttgaagaggtgtcttttgtggttttaggaattttcacttctttaattgggttatatctgaagtaggagtctttaacagcttgatccataaccatcttaattacgtgatgaaccccaataagtgtgttcttggcatattgcggcgctatatcattcagaaaattacggtatattttttcattgacgctctttaatttataagcccctaagtgcttctttaaaatgattaaactatcatgtcttgttttccaagagctttctttgacggtgggcttataatcttcaaaccatttatcaaggtaagtggccagtctaatattatcatccttttcaaaaaaatcttgatcaatgttgatttcagcttgagcggctgcaaccatagcttcttttttagtcctgaagcctttctttgttttttcgcgtcttttgttcgtgatgggatcatagtatgtaattctgtattcccaattgtctccgcgttttctataactcgccattgatcctatcctccatttttacttaaaatcactttattaatattattatgcaactcaatagaatttttttgtagagtaaagttattttcgtttgcgattagttcaattaaagttaaagcttgttgccatgtgatacctgtaaaaattctcactaaatatataatcttggtaagaattatggtataatagagaaaaatatgaatattattcttattcgaaattatcgttctttttttgatgctttcgtcaattatcgacaatgtttttcttctggacgtgatatattaatttgaagtggtgattaatatgaataaatataaatttgatgttagagggcatttgaagaatataattgagtcaaaggaagaatcgcaaaaacaaattgctgataaaattggaatcagcgcttcgcatctcagtaaattccttaatgggcaagaaatcgccttgtggatggtattggaaatcgttcgctatcttgataaggataatgaaattgaaataatgcgccagtgctgctatgaagcaacaaaaaagaatataaaaactgcatttgaatatgcacactcaaaaaaactcgattcgatgactactcatttgattggggaaacaattaatggtagcaatcgagagctgagggaatgggctttagtttatggctggcagcttgagtcaaagtattcccgtgtctatagtgaagttgaatatcttgagaagttaaaaccattgaagcctagttcgcaagatttaaaaaccctcttgttaattttagaaatgctatgtttttattatagtgggaaatttgatctttctttgcattatgtcgagaagattcacgatatgctgccagaaataaaagacccttttattcagaaggcatttttaagcaggacggatgaagctcttgctaatatgtatcttaaatttagaaataatatagagcaggcccgggaaagagccgcgaaattaatcgaacgaaatttcagtgtgaattcagtaactaatggatttttcatttcaggattatcgtatttctatgagtcttatgacaatgcagcttattattttaaaagaggtatagaacttaataactctcgagataggtattttgttgccaatgatttaagagagcaactggcgattttaaacatgttttgggaaagacctgtgtcaaaaaagcttatcgtatctgaattcataaaaaatgtagttagacagaataacttggaacaatattatgattatgaggtatactctgcattagctttttactttgatggaaaaagagagaagagcatagagaaattgcttctctcattacatatattttgtgataaaaaagactactttagagcaaatttgccaaaaatagagttgctaaaactgggggttgattataatattataaagaggggggtgaatattagtgaaaaagacagtcatagggatagcaataacattagtgatagtattagcctttgcttttagtacagcaatttctaatactgaacacaatgaaccacaacctttgcagaatcctggacacactaagcagttagctgatccaccggttggcatgagttacaaagttgtagagccgaaaatcacaaaaactgaaaaaactatattttattaaaaaagacgctgccaaaattataggcatcgtctttcgtgtttttaagaaggatttcctgttttaaaaaaatgaaaaacaggaaatccttgcttaccgatttatttttaaccatcaatacattataatagaacaaaagttcgcatgaaggggattgcataaaatgaagacagatatttcactcgatgaatttttggagaaaataaagcaattagccgaccaagaatcaatcaatatcagagctgccctttgattttctgtatgcttttaagacttctaacatcacatttatttcgtcgtcggaaacttctttaccgtcaacagttatattataattcttcctgagattttctattgataagtctctttcaaatgcaagttgtttttcagcatctgaaaacggttctaaatttttgtcgtctgtgaaaaaataagaacgatcaacatcaaaaaaattagataaagattcaatggtttttagagagggattttgtacgcctctttcgattttagataaatagctgtgatcaagacctactttttctgctgtttcacgcaacgtcagcttcctatcttttcttaatctttttattttggtgccaacactattattcaatgaatatcaccttttcaatttcattaggattcattttgttttcaatggttttgtttaatctattataacatgtcatggtgacatatagtccaaaaaacaaaattatgggttgtcaaaaaaaacgaggaatgttatatttgttttggggcatatttgtcacattttttttagagagaaggtgactacaggtgatcgagacacaaatcggtatcgagatcgggatgaaagttaaagaaaagagaaatcttctcaacctaacacagaccgagttagcggataagcttcaattatcgcgctcttacattagtaaaatagagaatggacaaagatgtccgaatttgaagacgttgaataggatttctattgcgctaaatgaatcaattgaatattttttttagatgttttggggttttttagaccacaatattcaggaggaaacttatgaaaattgaacttgaacaatcagatatcgacacaattacaagcgaagtaatcacaaatgtcagcgcagcgctggttcctaaaattcaagaaatgatcatggtactgtctgcacaggatcagttgctaacaaagaaagaggtttacgaagggatactcaaatgtactgccgctaccgcggaagagttgtatttcagtaggccggactttccttcgtttgaaccacctcagcgcccaggcggggcaaaaacccagcgaagattttcacgacgtgctgttgaggcttggatcgcaaagaactgtatttcgaacgcataaggaggttgcaaaatgtttttagaaagtcttgtttggttgcgcaaccaagtcgctgtagttataagtgagtctgtcgtggttcatgaacgagctatcgccgagctaaaagcgcaaggcggcgtctgcttgtctgatctatgtcagcaaaataccctaggctctgtaattgtaaatggcaagcggtctgtatggccgttgacgaaatcagaaggggtcgggctaaatgagcgaaattaaattcgtaaagctcagcactcatatgtttgatgacgaaaaaattaagcttattgaacagatgcccgaagccgacactttattaattatatgggttaaattacttgctcaagctggtaaaaccaatgcttcgggatacatcttccttagtgaaaatgttccatataccgatgaaatgttggcagctattttctcgcgcccgttgggggttgtaagaatggccttggatacatttagacggttcggaatgatcgagattaacgatcagaactatatcagtatttgcaattgggaaaagcatcagaacgtggatgcgatggataaaatcagggaagatacacgcaaaagagttgctaaatatcgggaaaaacaaaaggctttacagctttctcaacctagtaacgttacaggtaacgttacagtaacgcaaggtaacgaacaagaagaagaaagaagaaagaagaaagaagaattaaaagatatattgtcgagtaaacccgacgacgcatcttttttagaaaacgaaaaggacgagattccatacaaactgatcattgatctgctgaacaaagtagcgggcaaacgataccgacctactacaccaaaaacaaaaaaagacatcaaggcacgctggaacgaaggttttcgctttgaagattttaaacatgtcattctagtaaaaactaaggaatggctcaatgatcctgctatgaatagatatttacgtcctgaaacattgttcggtacaaaatttgaatcttacctaaatcaaaaaggaggatcagcaaatgaaggattttacaaaggaacaagcggccgcagtccagggcgaaatatctcggaggatgacattccatactgatgagcacggcaatcctgtttactgcgataaacacacccggattatcagtggagaagaaaagccgtatccagttcagctcatcaaacttcgggatggctctgcaaagtgtcccatgtgcgaacgggaacagcgcaataaggagattgagcatgaaaccgaggaatggcgccgccggatggatcaaaaggttttatctatgtattcactaatcgctgatccaacactcaaagaagcgacattctcaacattccaaagttataaccatgaagacgagcggaacaagcgccggatgatggagcttgttaagcaagtgaaggcgggagccgtcatgaatatcttcttaacgggtgaatctaacgcaggaaaaagccatctcgctatgtcagccattaaagagctgaacaagagggacgcagaaggatacgctaaatcagcgttgtttgtaaacagtgacgcccttatgagacgaataaagaattcgttcaaggacagctcagagaagcttacggaagctttcgcgatcgaactgctgacacgggttgattaccttgtcatcgacgatctaggggctgaggtgggcgacacagataacgaaaacagggcggcaaatgattttattcatcgcgtatggtacggcgtctctacggggcggcaaggcaaattcacgatcgttacaacaaatctatctggcgtggctctgactaaactttatgacaagaaagtcgtaagccggctcacggcacacttggaaacagtcaaatttgaagagaagcagaaggaaagaaaaggccgtactgcgcccgccctgtccttttaaggaggtgaaaatagttgatacaggcaatcatgcccggcgtgctgcagatcgtccctgaacgcaaattaacggatgaccagcgcaaaaaagaaatagacgagcttatcaaggttcttgatcaaaaaatagcagattaccagaactttagggggaatgcagtgtgaaacgaggtaaatctccgacgcgtgcgcaaaaggcaatcattaaggcaaacggcctgaccattgagaactggcttgtcttggagcacttgcagcacgagcaccgtctcatactggttcaccgctatatgaattacaaaagggagtgtttagcatgagtcaggcagtcaatgccgaacggtttgaacttgctttagaaaatatgaattatgaatggtcaatggtccagctgaaaaaggtcgttcaatactggcatgatgggaaatcaattcttgatatgtcggaattattaagcagggattcggatgaaatcattttgttggtcatggattttgcaagaaaaaacatcctgcccgcccgcaagaacggcttacgcgccaataataggataagaatatctgagaaaacgatgaaagagaaaatgattcggctgcgctatttgtttgaagaaagcccggtgtatataccttttcaggagctaaacttcatgttttatgacagcgaaatcaggcgtttccgggagctatgggcggcaaatgagtcatatctcaacatagcaaaagagctgaaacggaatgaggacgaaacattatttcttatcatcgaccaagcaaaaaaagacctcatagagcctcgggaatccggcttgctcggaaaggaagcgtcagaagatgaacgcaacaaacaaaagctaccattttgaaaaagcaaccgtccagcaacttatggtcatcgtgcgttatgaagactgcgccccggaggtacggaacgcggctttacaaatgctgattatgaagggagtggcagacgttgggacaggcagaacgaaagcatttaattgaatggcttttgcttatcggctcttttggcagagattttctaaaccgcaaatcagacgaagagcttgagcgcttatacaatcgcgaaatcaaaggattgaacgaagaataggaggacagcaccatgacagaaaacaaaaatttgcgtcggcacggcgaagttacaacacgggtgatgagcgaagaagaacgcctcaagtatataaaaaaacacccaatcattccgacggaaaaaccaaaggttggcatacagctattcccgtcaaactattggatgtaaggacggccgctaaagcaaccgccaccgtatgaataataaaacctagacacttttattataccatacggaggctttgaacatgcagccaaaacatatatcaatcaatcaaaatacaagtgtttctcaatttattgagccggggaaggtgtctgtcatcgtgttagacggcaatcaaaacgccgcgtatgtcgttgaggcaccggaacacggccacaccattattgagacattcaaaggcgggtttgaccgcgtacgctttgaccattcttacaaagtaaaaaaatagcaggggttttcccctgcgggggaggaacggaaaatgtatcaaaacgaaattgcccgcaagtgtgaacgctgcggaaaaatatattattcagctcattgggttgtatgcaaaacatgtcttttagaccgggaggcccgggcatgaaagaattcaaaatcaatttgtcaaaaggtgaagttttatataccggctcttacatttgcgccctttcaaaaacgccagccagtacacctgagcaaatcactttagaaacagccgccgaaaagctcgccgaagaggtaatcatgcaacaggctatgaatcgagaacaccagcgccagcaggaagtcacggtaaaccagtttcggcaggctcaggaagagatcagccggctacgaggggaattaaaacaagctcatgagaagtccagcaaccatctcgatgaatggcggagagccgaaacccagaccgcgaaaatatcggatgaactaatgaatatgaaagtcttactgcgagcggaacaagggaaggttcggcaggcacaggaagagattcaacggcttacaaaagagaatgacaggttcagaaaagcctttcatcagttcgcgaatatgaaaacagagagaacggcgcctgaattggtaattcaaaggtattcccgatatgcgaaggagcttcttgaaggcagaggattggagggtgatgcggaatgagcgaattatcccaagcacaaacttgtccgtattgcaattgcacagaagaagcatccttttctaactgggattcagacagcgacgggatcgtaacatgcacgagttgccataaagaatattattcaatgcccaaatatcactttgagggttggcaggttgaaaaaatatgcgaagaatgcggtcatgaagaaagtgaatgtcattgcgagggggaagaaaaatgatgccattacaagtagaactgcaacggaacgtgaaggccacgaaggacgaagcaatgaccgtcgagcaggcggccgagcttttaaaggttcacccggactacatcccgacgctggtcgctcgttctgacgatctcaaaatgatcggcgaccataccattatcgctaaacgggataaaacaaatatctggctggtcggggcgtgtgtggggcttttcttcttcgctgtctccgtgctaccgggaatgttggggtgacgggatggcaacagcagagcaattgaaacgaatgaacgacataaacgacttggtcaagcttatcgcaagcattgatcatcgtacattctaccgcaagtcaaaggatcgcatagcgtatttcagatttaagaaaaaactgttcttcgttgatgattacacaggggatgacgtttacccatatgaaatgggatacggtagtccaaacggtttttcgcatggaggcaacatgtggcaactggtcaacagctttagaaagttcatcataacagggaaatgcggcgagctgagagattataaagaaatatgggcttacagctatgaaggatgtatgaaaatccgtcagaaggcgaaggagatcggtttcattgaaagtgttgattacccctacagctttgatgaatgggcggatagtaaatgatcgaataccattgtccggactgcgattataaaaaactcgatttagaaatccgcgcagatgcctgctgcccgcattgtgggcgcgtcatgggcgctgaggaggaaatagtgtgactttacttgatgatatcggcttcacagaagagcaatatcgagagctgcgtgaaatcggtttgtctgacacggaaatagcgagagaggaactccattgctctccatccactctttctgtctggaaaaagactaacggcatagtaatccagaaaccgtatcgcctgttcactctggaagaatggacggagcttcgtaaccagaattggacacacccccaaattgcccggcatttcggtttcgaatgtattgatacttatttctatcatgcaagaaaaataggcgttccgcgtaaacggagaagggagaaagttgaatcatgaatctacaaaaaatgttcgaaatgcaaaaggagcttgatgatcggatcataaaagaaaaggggcttgaggggcaggacttgctgccaaacacttatgtcgctcttgatactgaattagctgaatttgcaaatgaaggacgctggttcaagcattggagtaataatcaaaagccaagaacaaaattatcaacaactgttggcgcgactcctgaaaacgcatcctttttccgatgtgaaaatcactattgcggagaatatttaaacaaagatgatttcaaacacttattagatccggattatgaaatatgtcctgtttgcaacgcggcttatgtaacggcctttcgtgatgaaaatccactgcttgaagaatacgtggactgcctacactttttcctttcaatagccattaaaaaaggttgggaagatgctatgagtctaccggaagaagggtttgtcgaaatgaagaaaaagggatttgaaggcggtttaacaggtgtgttcctagaaatgaaatggatgctattaaattcttacatgtccaaagatcagagcactaaaaagaccagtttcagtttggcttgggccttgttcttgagcattggaactatcggtttcggatttactttggagcaaatcgaagccgcatacatggacaaaaacgccgtcaatcatcagcggcagcaggaggggtattgatggatattatcattcgatatgtgttcaagcatcgcgcaaccggaaatattgagatcaagatatattcaatcggacaactggaagagcgagtttctaaaaagttatcgccttgctttgactcagatgaatatgaacttgttgaacgtaatttgtacacaggcagagaagatgtcaaggataacaggatttatcaaggagacataacccgcgacgtaatcaaaaatcaaattgggataatctgttatgatcgccatcaagcaaatttcaaagtagttcctattagcatgtactttgccaatgccggtaatgggggttggacaggttaccaccttagaagcactgttcccttggaagtcgtaggcaatatttatcaaagtcctgagttatgggaggacgtggaatgattggagtcatattattcctgctcctgttttgggggtttatagtctggtggagaaattattgaggggggcgcgcgatgaaagctaaatcaattcaacttttcgatctgtttgatgaattgagcgaacaggtgaacaacgtcatgcatgacgcggtgatttacagaaagcgaaacagactcaatgtgatagatcaaggcgcaaaagaggccgagcggatcacaagagaaattcaaacgcttgtcaattcgatgcgacggaagaaggtggacacggaatgccaaaagtgaatggaacattaatcggatactattgcgatgactgcgaggaatggacattcttagaaaggccagccagcacgtccgaaatttattgccctttttgcggagaacaaaatcttgcgatagattctgatgatttaagtttactggaagaaatgatgaaggagggcgtggaatgacaggaacaaaaatcacaatcaaaacaagcgataaggttgaagtcacacgggaacaggcacgggctattgatgaaggcatgaagttttatttaaaaatggctgatgctgaacccgaaagagtgaacgcgttgaccaaaggagacaaaaaagaatttgcgcgccttcaattcgtcgggaaacaatttgttatcaataatgaggatgtcgaaccgtggaccggattgtttgatccgctgaacagcatgtctgcttatgatctaaataaggcgattttgaaggggtatatcgttaagggggaagaatgatgatcaacaaagtcgtaatcgaaatcacagcagaaaaaggcattgtgaaattgtttaacgagaatggggaagaaattaacaggcaggaaacttcaccaacagaaagcggatcaagtatccagtatacaggcgccgactttgaagacatgacagcagaagaaggcatgacagacgaactgtgggaagcgttggagcagaatttttatgtccatgatgtattaacagcaatgaggggagagtaatcatgaaacaactattcaaatcaatcattctatcggcaatattatttattggagctgtggccgttgcgccgtctgcttccgccgcatggtccggctggcaaaatgaatccgggtacagcggccgggtgtttacggatgccgcgacttacacggccggcgcctcaacggtggactggaaagccgagaaaaaaggatcaagaactctttattacacggccggcgtatacaagaagcgcagcggcggcgggctgactgatacgaatttagtacagcggggcagcttcaaaacggcaacgcctctgaaatcattcaacgtgaaaacgatccggaataagaccggaaagggaacctatgtcattcagctggactgctactctgattccggcaagcggaactatattggaacatttgaatcagctaaatttcaaatcaaataagggggattcgatggcgctgagaatagtttttatgctgatggggttaggtttctggttttatttccagtacgaatacaggccggacatgaaagcaaatatcacgttaataggcgcaatcattgcattcacggccgcggcgttttttcaagatattgataagtatgtagagaagaataagaacgaatctaactgaataagtccaagacggaagaggtgaggaaatgaagaagtgcgaggaaaaagaagtcacaaaaacgcaaaaagtcttgaaaaaagtgacatgcgatacttgtgggaggactatcgttacaaatgatcggtcaaaacattactatgaagtcacgacatatcatagcaggtggggaaacgacagtatagacagttatagatatttagatttttgcagttataaatgtcttctcgaaaacatgaatgactatttcaaaaatggcgctgatacagattgttacgaaattcaatttgtagaaggagattagcagccaggcataacaaaagaagatgaaaacaaaataaatgtccaagacggagagcctgcggacactgatcattgcacagaatcactgtgctctgattagtgtccgttttttatttgaacggagggacggcatgaaagcgaagaaaaacgccgcgcagaacgttggttttaaagaaaaacagccatcgtcacgcaagagtattgaaaaaaagccgcagaagcttactgagagagatttagagaacctcatgggtgtgaacaggcctacatataaaagaggtcgtggcggagcttttagacagcaataataacgggaggggattttaatgaatcaaatgacactgaatattcctcaaattgacgaagaagcaacgagaatgaacgcagaaaagctgcttgaacaatatcgtatatacttgttacaagtgccggcggattttttgccgaaagtgaccgcaacatacagccttgttccgcccagcttttcaaatgaatttcattcctccacagaagacgcagcgttaaaacgcatggattgggagattgaaagggaccggtttttaaagagaatgcaaagagcggttaatcggctttctcaaaaagagcggcaaatacttgtcatgctctacatgcagaatgaagaaatgtatgattatgaagtctatggagaaatgagactcagtcagcggagctactaccggacgaaagcaaaagcattttaccggctggcctttgctcttcgcgtggaagtctataaggacgggggcgcgccggaatgaattttgttcagccgataagggacttagaccagatatattatattaaaaagtacctgaaagaacggagcgaacggaatcaccttctttttgtggccggaattaattcaggtctgcgcatatcagacttgcggcttttaagggttagggacgtgaagcgcatgtatatcgacctgcgggagcaaaagaccagtaaacaaaagcgaatcaaaatcaataaagcattaaagaaggcttttgctgattatatcaaggacaaggatgatcaagaattcttgtttaaaagccgcgaaggactaaataaaccgataagccgcagtatggcatataatattttaagggaagcggctgattatgttggccttgatggtatcgggactcatacaatgagaaaaaccttcggatactggcactataagaaattcaaagacgttgccttgctgcaggagatatttaatcattcaagccctgatattacgctcagatacatcggaattactcaagacaccatggatcaaacaatggatgcattcagcttataagctcatctgtttaaaaaacagacgggcttttttttatgccttatcctatgaataaaccatattgagaaaatgtcaaactcattttagagaaatgaaataaacatagtggtggcaaaggattcagcgattcggggaattggacacaatataagttatgattaattgggttatgtggaaaatcttgtcccttttccgtggtatcattaataagagatgagggaggttgttgcgaagtgaaacattgtccgaagtgcaacccaattactgaaatggagctgctcgttgcacatgaagaaatgacatatagtctttatcgctatgtatgtcgagcatgcaaaacgactgacgatgaagcggacctaattagaatcgaacatgataatttgtagattgtgggataaatagaaaaattggaagtttttcgtggtatcatcttttacaggaggtgagcggcatgagtagaggcgcaacaggttcagcgttagaagagaaaggcatggtttgatagaacgataccaagtaatgaaggggtgagcgggatgactgcggcagagcaaaaaggaatgtactaaaaagattttggcagaaagatggcacgataacggcacaccattttgttttagataaggtattatggtaataggtaataaacaggcaggcgctttcccaatcgggagggcgcttttttatttgggtagttgcataccactaaaggtgttcaggtgcacatgagcattggaggaaaggaacgtttcagggggaagggaaacctttaaacagtcttaatcccccttgattttatattctctgtaaactgcgtccggtaaatctcagggaaaacaattggcggttaacggcttgagtgcgggggcagtttagaaagaatataccaagcgctttcctaagtgggagggcgctttttaattgtcgaaagggagcgatgtaaatgaaattggaattagcaaatagaaccatctttgagttacttaaagaagcacacgcgaaaggagaaatgattgttacgaatgaaaggcagaggaggctaggaaaaacaaaagcgttgatgttattcgcagaaataaaccaactgcccgtgatcgtccggcaaatgcaaaaaagatattatcaggaagaacacccagacgttaatatatttgggcatgaagaagttctccgctttgacgcattacctctaacacttttatgtgatgagggagtaccaaaaagcactattgaagaattgaaaactaaatgtcatggggtatcggggtttctgaacgaatttcaagatgctaatgaatacgccacaactgtagtgggctttgatccagctactctaaagagagatttaagcagcctgacagtcgagaaaattttcgaaacgcctttgctaaaaattgaacttgatgagattgattccgcgccgcgcattttctataagggcgaaaagattactgatcgcgttgcggttgattttgaatggcggacggaggaatcagataaaattggttcggcctatattcgtatcaagcatggcaaggagatcaacgggatgttgactgtcgatacaaaggaaattgcatttggtgaaagggcttataggtagggggtattcaatcatgaagaaagctttgaagccttgcaatgaacccggctgtccaaacctcacacgagagggctactgcgaacagcacaagcgaaccaagccggcctatgatcaataccgggagtccgctactaaacgggggtataacagcaagtggaggcagtcgcgcgctggctacctgtccaagcatccgttatgtgccgcctgcttaatgcaaggcagaagaaccccggcgacagttgtcgatcatatcgttccgcataaaggcgacaagaaactattctgggactcgggtaactggcagcctctctgcgggccgtgccatagccggaagacggcaaaggaggatggaggatttgggaacagaacatcaaacgtgcgtgtgtgatcaatgtatgaccagactgcttatcaaaggctgttcaaagatcaggaagcacgacaacggaatcaaagagcattatatcaagtgtccacgctgcaaggctgagtatacatccttctatacgaacgaggacatcagacgaatgcagcacagaataagaaagatgtttgctttgcgtcgtaatatgaaaaaggaatcagctgtcgatctatattcaaagaaaatagaagcagcacaaatcgaaattcaagcagccatgaaccagctcaagaaggagatggagaccccccgcccttaaatccctagaggacgtttgccggagaccgcgctcccctccccattttgataaattccctaaatgaaaaatcggaaggaggtgagggaatggccagaccgcggcaacctgtggacttgttactttataaaggcaagaaaaacttgacaaagcaagagattgaggaacgcagggaacaagaaataaaggcgccgagcgacaaagtgaaggctccatcatatttgccaaaagacttaaaaagagagtttaaaaagatagcggatgagcttaaaaacatcggaattatgactaatttagatgttgatgcgctcgcccgttttttgtttgctcgaaaattatatctgcaagtaacggagcagttgcttgaacgaggaccaatgaaaacagtgatcattagaaaattggatgatgacggaaatgtaataggagaagaagaaaaaattgttccgaatgatgactattccgatcttttaatcaatcaggacaagctttttaaacaatgcaggcaagcttccagtgatctggggttaaccatttcctctcgttgtaaacttgtcatcccgaaaaaagatgacggaaaacagaaaactaaagaggaagaacggttcgggggccgcatgtaatgcaagagattacagccgaaattctcattgagcgggtttggtcatatgctgagaaaattcgctccggagaaattaaggcaggcaaaaagcaaaaatgggctgtagagcgattttttaaagatgttgaccggctcgcagaagatgactgcccttattactttgatgctgaagctgtggtggatttttatgaatggtcgcggcaatttaatcatgtcgaaggtatacttgcagggcagccgattgaattaacagactttcagctttttattgcggccaacatatacggattctataaaaaagaaaatggcgcccgccggtttcggaaagcttatatccagctggcccgtaaaaatgcgaaatcgcaatttttagctttaatcgcgtcgtatgagattttcccgacacaagaaaaacaccgggtatttatcgcaggctggtcccgtgaacaatcagatgaagtataccaggcaattcttgagcaactgcatcacgcgccgatactcaaagggaaatatacctctgccaacggccgcgtgaaaaaatataaaacaaactccattatccagcctctttcccgtgaggcccggaagctcggggatggtaaaaacccatctttgggaatcgtggatgaataccacgcacatgaaacaagtgagatttacgacgtcctggatagtggaatggtcgcccggcggagtccgttaatggccgttattacgacagcgggtttcaacatggagcggccatgctttaaggaatatcaatatacgagtaaaattcttgatccagacattgacacggagaatgatgattattttgttatgatctgtgaactggacccggaagatgacataaaagatgaatcaaattggatcaaggcgaatccgattgtggcaacgtaccccgaggggatggagtcattacgttctgctttaaaagtggctcttgaagtgcctgaaaagatgcgcagtttcctcaccaaaaatatgaaccgatgggttgaccagaaggataatggttatatgaagatgacaaaatggcgcgcttgcagcggggaaattcctgatctgcaaggactgcccgtttatttgggccttgatttatcaatgacaacagacttaacctccgttggatatgtggccgtgcaagacggctttttctatgtcggtcaacattcctttatgcctgaagcccgagccaaagaaaaaatggcaacggataaagtgccatatgatttgtggagagagatgggatttatcacttatacatctggcgaagcagttgactatcaattagttgaacaatggatcattgaatttattcataaaaaccgttttcggctacaagagacagcatatgacaagtggaatgctcttcatttagcgcagcggcttgaatcaaaagggcatacaatggtggaactgccgcagagaatcaatcatctttcattaccaacaaaaagctttcgagaaaaggtatttgaaaggaaagtcgtgcatggcgatgatccggttttaacatgggcaattaataacgcaattacgaaaatggacccgcaagagaatatcatgctggataaagcaaaatcaccgcagagaatcgaccctattgcggctgttataaatgcttacgccagagcgatgtatcacgacacaaaccatagagtagatttaaataatcacttcggctctgggaatttcagtttttaggatgtgagaaaatgaaaaaagtcaggaaaaagatcaaagctttttttaagtgtttttttcaccccaagtatatgaaagccctgctttcttttttctgcttgataataaatgatctgctgtttatggcgggagccgcctttattctgacagctgtctatagatggagcgcaaacatcggtcttattctgacgggtgtctttttaatgttttatgcgtacctcatatcaaagaaagcgaggtgatataaatgctgcttgaacgaatgtttgagaaacgttctggctcgtcagatcatgaagatggttttaacaacattttattaaacatgttcggcggccggaaaacagcaagcggcgaaagagtgagtgaaagcaactcacttgtgcagccggacatttttgcatgtgtcaatgtattgtcggatgacattgccaaactgccgatccacacatataaaagaacggaaggcggcatagagcggaaaccggagcacatgtccgcgcatgctgtttatgctcggccgaatccttacatgacagctttcacatggaaaaagctcatgatgactcatgttctgacttgggggaatgcatattcctatattcaattcggaccacatggttatccggaagcgctctttcccttgcgccctgattacacgaatgcttacgttcatccaacaacaggcatgctgtggtatcaaactgtgttaaacgggaaagccattgaattatatgactacgaagtgctgcattttaaagggctttcgactgacggaatacatggaaaatcacctattggcgttgtacgggagcatatcggggcgcaagcggctgccacaaaatataatgccaaactgtacaagaacgaggcaactcctcgggggatattgaaagtcccggcgttcctggatgaaaaaccaaaagagaacgtgcgcaaagagtggaaacgggtgaatcaaggtgaaaatatcgccattatagataacggactggaatatcaatctatttccatgcctctgcaagaagctcaattcgttgagtctatgaagtttaacaaagcacagatttccatgatttataaagtaccgttgcataagctgaacgaattggataaagcaacattttccaatattgagcatcagtccattgaatatgtcagaaacacgctgcagccgtggattgtgaattttgaacaagaactaaacgttaaattgttcttagatcacgatcagaaaagcggccattacgtgaaattcaatatagacagcgagctgcgcggcgacagtaagacgcaagcggagtatttgaaaacacttcatgaaacaggagtgctgaataaagacgaaatcagagaattacttgagcgcaaccctattgaaaacggcgataaatatatctccagcttaaactatgtgttcctcgattttgtggaagaatatcagcggcttaaagctggcggcgccatgaaggggggtgacaacaagaatgaaggataaagaggttcggcatttgacgacgccgattgagctgcgttccgaaggtgaggggcagagtgaatatatcgaagggtacgctctcaaattcgaaaaatggtcagaacgcttgggatggtttaaagagataatcagcagaacagcccttgactcagctgacatgtctaacgtcatcgcccttttcaatcataagcaggatttccccttagcgagaaataccgtttccgaggatactggccgtcttgaattagaaatagacgggataggcctcaaattccgatttaagccctcagacacgtcatatgcgcgtgatttaataaagaatgtccggagcggtgtgatcaatcaatgctcctttgctttttcacttgattatggggatgctgaggcagatgaatggcgtatcaatgaagatgaggacatttacgaacgacgaatcaataaaatcaatcgtatttttgatatttcactcgtcactacccctgcttacagcgatactgaggcggttgtaggtgcccgcagtttagaaaaggtagagcagctgaaagaaagacgtaattcatcaaatgaagcgttgaaaatggaattggaactattaggccttgtactcccggagtaaggtcttttttagtgcagaaaacaaggaggaaatgattttatgccaatgcaaatgagcaaaaaagaaatctcattaagacaacagtttactgaaaagaagcagcaagcagacaaggcgctgcaggagggcaataccgatgaagcgcgtgcattgcttgatgaagtgaaacagcttaaaaatcaaatcgaattgatgaccgaaggacgttcacttgatgtcccggatttaccgggcggtgtaaactttgtgcccgagcaagagcgcaacccagaggggcagcgttcacaaggtcaaggaaatgaggaaaggcaacagcaatacagcaaagctttccttaaaggattaagaggcaaaagacttaccgacgaagagcgtgaccttctggatagtccagaatttagagcgatgtccggtataaatgatgaagatggcggaattttgatcccagaggatattggaaggcaaatccatgaatttaaacgtcagtttgagccgttggaacaatatgtaaccgttgaacctgtcacaactcgatctggaactcgtttacttgagaaaaatgctgatatggtgccgttttcacctgtagaggaattggggaatttacctgagattgatcagcctagattcacaaaagtatcctactcaatcatagattatggtggcatcatgactctatctaattcaatgttgaatgactctgaccaagcgatcatgacatatgtagcaaaatggttcgcaaagaaatcagttgttacccgtaacaatttgattttggctgcaattgcatcattgaaaaaagtagatattgatggtttggatggtattaaaaaagcattaaatgtcacgcttgatccgatggtggcgccgggttctatcgtgctgacaaaccaagacggatatgactggttagacacgcttaaagatggaacaggcagatacctattacagccagacccaaccaatcctacaaagaagttgcttgatggacgacctgtcgtgccttttactaacagagtattaaaaactcaaaaaggtaaagctccactcatcatcgggaatttaaaagaagcgattgttctgtttgatcgtgaacaacagtcaattgcatccacagacacaggggcaggagcatttgaaacaaattcaacaaaagtcagagggattgaacgagaagatgtccgtaaatgggatgaggatgctgtagtattcggacaaatcacggttgaataaggagagataatatgagctattcaacaaaaaactacaccgccgacgggggaaatcgtaccgtcatcggcggtgttttagaaattgccgggggcaaggtcattaaagatggacaagaggtcagttttggcggcaaccaatctgaaccaggacccggaagcgtaacccatgaaatgctggcggataagtcggtccgcagcaggaatatcggttccggcagtgtaatggaagaacacttgaattcatctattttagatcgtctcaaggctattgaagataaattgaaagagctttccggttctgagtctgacggaaaaacggaataaaaaataaacggaaaaggatgattacagatggctgaagattatttatatgaaagtaatggagtcaaaacttcatctgaaaaaggaaaagacggcaaggcgataacgccggtctatctcaaagaaaacagcgaagaaaatcctctttttgtaaaagggttgcagggtgaaaaaggggagaaaggagacaaaggcgataccggtaaacaaggtcctcaaggagaaccgggtgaaactggcccgcagggaccaaaaggcgataagggagaacccggagaacagggaccacagggtgaaccgggaccggccggaccaaaaggagatacaggtgagcaaggaccccaaggtgagaagggagacaaaggtgatccggctgttattgaagagggcagcattgcgcatgaaatgcttggggaaaaatccgttcggagtaaaaatatcggctctggcagcgtaatgctggagcatttaaacagcgaaataacaaaagtgcttgatgaattgaaacaaaaaatgaataaccttgaaagtgacctggctactttgaaaggaacagaagaagaaccgacagaataggcggtgtgtcctgaatggatttagaggctattaaaaaatatttaaaggtcgagcatgaagaagatgatcgtcagcttttgaatcaaatggcggcggccaaaagctatattatcaacgggataggcaggtatattgaagggcacccgcaatttgagctagtgcttcaaatgcttgtccaacattggtatgaaaacaaagggatatatgagtccgggggaaccggcttatctatcccttttactgctgaaaatatattgacgcagctgcgttatgtatctgtggaggaacaagaaaatgagaaaaaagatcagccaactccggcaccgtctgacctttcaaaagaaaactgagacacaggatgaagaaggtaactggaatgcaacctatgtggacttattcacggtctggggagctgtagagggggctggctctctcggaaatagcgaaactatgattgccggagcattgggagtcaagacccctaaaaaaatcacggtgcgttaccggaatgatataaaaccgaatatgcggattgttaagcgcgttcctaaagaaaaaacggaacgcgtttttgatattttggacactagcgatccagatgatcaagaaaaagagcttgagattctttgtcaggaggtgggaatcaatggctgatattagctttgacggcatagatgatctaacgcagtattttgaaaaaatcggcggagacgttgaaaaggtggaacccgtagcgctaaaggccggcggtgaaattatcgctgaacggcagcgatcccacgttaaccggagtgataaaaaacaacctcatatgcaggacaacatcacagtctccaatgtcagagaatccaaggacggagtgagttttgtggcagttggtccgaataaaaaggtagcgtatcgcgggagtttcttggagtggggaacctcaaaaatgccgccgcaaccgttcatagaaaaaggcggaaaagaaggggaggggcctgctgtggaattaatggagcgaatacttacagcaccgatcaaatgatctattctcctaaaattgaattggtgagtacacttaattccagtgccttattaaaaagcctggcgtctggcggaattcataatctcgtcgcaaatgatgtcagtgcttttccaagagtggtattttcggagattcaagacgccgatacggattttgcagacaacaaggtctattcatttgaggtgcgttatcagatcagtattttcactcaagcgagcacccgcggcaaagaaacagcgattgctgccgaaatagacaggcttatgcgggaaatcggctacagccggtatgattctcaagatttatacgaaacagacacaaaggtctttcataaggccagacgttataaaaaaacctattatcaggaggggaaatagatggggaaagtattatccggtttggatatgtttcatatcgcagaagtattaaaagacacaaaagatgaattgaaattttctgttcccgaagaaataccgggcgccgttaacttgaaaattgatcctaaatcagaacaggaggttttttatgccgacaacgtggcatatgccactgttaatagtttaggtgatattgatggtgaaatggaagttgccgaccttcctcttgacatgcagtcaaggattttcggtaagcaagtggagaatggcattcatttttctagtgctgatgataagacactagagattgctcttggtttccgggccaagctctctaccggtgggtacagatactattgggtgcttaaaggaaccccagaattagtaccggttgaacacaaaacggacgaagggaaagctacgccccaaacagcgcaggtcaaaattaaattcatgcctcttactaatgtaaaagagggtaagcgcagatgggatgcaaaagcagaagaagataaggccaatgggattaacgctgaaacatggttcaaacaagttgtctataaggacatcacgaaagagggaacgcctgtcgttgatgtcggtaaataattcattgagcgcctaagagcgctctttttatatgaaaaaggaggaacttacatggaagcattgtctattacacttcgacttgatggcaaagataaaaaatttgttacacctgaccacattacaggtttattgttccggaaggctgcaaagatcgcagacgattttgaatcacaagattcagagcgtctttttactaatgaacaggttgaatttgtctgtaatacctttggccagaaatttacgcctgatgagtttgaaaaaggaattgatgcccggctggtaggaagaacaatctatgctgctgcacagtatgtgttggggaatattgcagaagcaacggctcttttaaatagcgaggggatttccagcggtgaagagccgggggagtaagtctgcctgagtcagtccttgatatgtataacgcccttgaggaaataggatatacacaaaaccaagttgacgaaatggacattgtctatcatctgaaaagactggctcggagaaaatcacaagagaagacacaaacgaaggcaaaaaacaacgatgaacctatgtatattgatcaatttctcggataaggaggtgcccgattgagcaaagacataaaggtcaggctgtattcgaattcatctgagtttaaaaaagaaatgagcgcctgtgctgttcaaatgaaaaatttgaagtcggaatttgaaaaaaaccgtacggcagtgggtgtgtggggaaacgaattaaaaactgctcaagtaaccgaaaaaacattaacacaacaattggaaacacataaacgcagagtaaaggctcttgagagagcttatgcagacgcggctataaaaaaagggaaagacataaaagaaacgcaaaccctcgcccgccgtttaaataacgctactgccgcaatgaataagacgcaaaacgcgctaaatagtacgactcagaggataaaagcgttagaggaggcagcgaaaagagcttcctcccgtgttcggatcatgggcgaacgaatggattcaattggcggaaaaatgcgttccgttggttcgtcagtagctatgacatcgggcatcgcctttggtgcgctggctctgtccctacgtgatgctgttcaggtcgggattgactttgaaaagcaaatgagtaaggtgcaggccatttccggcggatcggcggcagagatcgcaaaattgagagagcaagcaaaagaactcggtgcaaccactgtcttcacagcaagtcaggcagcggatgcacagggttttttggcaatggctggatttaaggtgaatgacatttatgacgcaatgccgggaatgctcagtctggcggcggccggtcaactggaattaggaatggccgcggatattacatcaaatatcatgtctgcctttgctctaaaagcaaaagagtcagggcacgcctcggatgtcattgcttacgccgcagccaatgcaaataccaatgttgaacagatgggcgaagccatgaagtttttggcgccgaacgctaattctcttggttggggaatggaagaatcagcggccgccattatggcttttggtgacgcaggtctccagggttcaattgccgggcaggcttttggtacatccttgatccgtctcgcttcaccaaccggtaaggcatcgaagcttgtcaaaaaattaggttttgatttcttcgatgcagccggaaacatgaaaagcatgccggaagtcgttgaggaaatggaaaaaggtctgaaaggcatgaccaaagagcaacaggcggccgcattaaaaacgatagtgggcgctgaagcatataagcattgggctgtccttcttcaaaaaggttcaaaggctctgggggataatactaaggcgcttgaaaaatcagatggagccgccaaaaagatggcggatacaatgttggataatgcacacggaagcataatagcttttgagtcagcacttgaaggagcaaaaatcaaactgacggaaagcctgctgcctgccctgggcgatttagcaaacaaaggcagcgacttgattatgatgttcaataatctggattccggcaccgtgcaaaccatagcgaaaacagccgttctggcgacaggtgtattaggggttacgacagctgtcgccacccttacagctggaataggagcgcttttggcgtttaccggtcctgttggccttgcgattgtcggaggcacagcactgcttggcggtatttcagttgctacatacgcttacactgagcaattgaagaaccagaaaaagcagcaagaagaggcgcgagaatccgccttgctttacggggagggcgtttctaaagcaacacaaaaatctgcttccgcctatgtggatttaagagaaaaggcagaactgcagctgtttgaattgacccgggtatctggttcagaagctcagaagatgtcagctaaattagttgaaacttatgccagtatgcgcgaccagctaatacaagaacttgaagggcttaaaaaagatgctctggttgtcttaaaagggctatacgcagacaccgatgagaaaacaaaaaaagccggcgaaaagatgactgacaagatggttggcgcaattgataaagatatgcaagaggctagaaataagctgaaacagttaaatgctctacaaaaagagacgggcctcgtcacttccaacatgaatgcctcacaaaagaagcaattcaatgacattgtttcctattttgaattgtctacaagtaaatttgcggccaatcaaaaagaagctttagcaatgcaaaaagtggtaacggatcagcaaggacagctttcatttaaacaagctcagaagtacaacaacgacattaaaaaagtctatgacgatggtaaacaggccgccaagaaagacatggaatacagaaatgatgttattgagaagttgtttgcacagggatatatagaggctgaacaaagaagatcattactgagcaaaagcacggctgactataataccgcattagcaaaaaacacggatgcctatgaaaaaaattcaagagccttattttccaaaatgtcacgagacggcaagttgcttgatttagagaccggaaaggcattggatagacaagatgaatttatatctaattcaatggggattatggtcaaaactgaagagtctgaagctcaatatcaagaacgatgggcagcccggcaaatagattttcttcaaaaattaggacaatccaaagaagaagcaattgagactacccaacaggctttagaagagttttaccaaggcatggggatgacccaagaacaagcccgtgaagaagcaagtcagatggttgccaatgttgaaggggaattagataagccgacaagcgccgagcaatcagggaaaaaggttgccgaggacttttccgctggcttgaagcagtccacaccagcagttattggcgggggaacggtcttacagcaggcccttaacaattcgctttccgcagataataccacgcccgcacaggccggacaaaataaaggtaatgcctttcgtaccggtatcaattctacgaggcccggtaatgcacaagcaggatcatctatacttcaatctgctttaaatgagatgaggaaaggcggcgggcaagcaaatgcagcaggacaaaacaaaggaaataagcataaagctggtttaacgtctaccaaaggcgctaatacatctgcggccgggtctctcagcttatctgtaacgaataatttagccaaaacctcagacggcggaggcggtaaaaaggccggaactgaattggccagcggcgttctcagtaaaaaaggcacagcaaacagcgctgggaaaagtgttgcaaacagcgcaaaaacagggctgaaaagcgttaagacacaaagtgtcggttctgactttgtaaccggctttataaatggaatgggatcgcaaaacggctctctcttcagcgcggcatggaacttggggaaatccgccttgcggactttaaagaagtcaattgactctcattctccctccaaactaacaaaagcggaaggaaacaacttttctgatgggtttgcgttagggatagaggacaaagccaaaaacgtaaaacaaagcgctgcttttatggcgcagaacgcgatggcctcgtttaagcaggaattaaatcagatggctttcaacataaagggggctgctgatcagctcatttcaatgaagtcggagcttaccgttcggaatgaagttgacacgcctgccttaaaccaaaaactcgatgctctaatcacactcctgtctcagaaacagtctggtggggcaggccaggccgcgatacctcagcagcctattatcatccatccggctgcggtgcatatggacggccaacaaattgcgactatcgcttttgaaaaaggagatggcaggatacttgatcagaaagctgcagaccgatacaaccagaatgcctataaaggcggtgtcagatcataatgctagatttatatattgattttaataacggtatgggggaacaaagtttaacaggcattctcccccgttttaaggtgcgcagcttcacgcctgactcaccgaatattgaacgagaaacaacaaccctcccaaggataaacggtttagtgctgccgcagcacccccgggatgttgtctacaaagagagagacatcaaggttgattttttattagattccatcattcccgaaaccttttatcagaacaggcatgaactttattcattgttagtgcagccgtttccttattatatttcgacggaccttctgcctaaccgtcggttccttgttacgtgtgacgggaattttactatcactaaggacaaacagaaaaatcatgccacatttacagtagggttcacggacattctggggcttgccgagtcgaaatatacctcttctaccatccagaatttcaatggggagcattggagtcccggcatgggaatccttcggagagatgatcttgaatatcatttcaaaaaccaaaaacgattcagcgtttacaaccccggcggcgccgcggtcaacactctgcagcatgattataaggtctttctctgggccaaagggacaaacgtaaccattgcgaaccgaacgaacggggaaaaattgaaaattgagcaggagctaaaacgctcgcaaaaagtcacattcatcaggcagtacactgtaatcggggataagcgtctgaaaacatccggccgtctgccgacactggatgtaggatggaacgattttgaaattataaactcaaatgactttgaaattttatttgatactcgtttttattataagtaaggagggatgacatggctgcggctgactttattaaaagtctggtaccaggagcgcagaaggtacggaaaaaatataacgtccttgccagtcttgtcattgctcaaggctgcctggaaagcgggttcggaacgagcggcctttccaaacaagcttacaatttgtttgggataaagggaacctataacggaaaatacgtgttgatgtggactagcgagcaggacaaatacggaaatgttgagagagtacaagctaaattcagaaagtacccttcatacgcagagagtttggctgatctgggaagcttgtataatcgtcttgatcggtataaagcagtggtaggggaaacggattataaaaaagcatgccgagccgttcaaaaagctggctacgcaacagacatcaactatgctaataaattaattaccatgatcgaacagtataagttgatgcaatatgacgatgtgtcagaattgccgaacgagcctgatgatccagaatccccggagacccctgaagaggaaccgagctttccgagtaaagaatatgcgggtaacgacatccctctaaataaaaaactgccgtcagatgtggactttcctcagctgcatgtttccacgaaagacggaaatgacgttgtggaagtaacaggcgtgatcgttgatcttacagacgatactaccgggaaaaagagctttacctttacaattaccaaaacagaaagcaatgcgactgaattcgatttactgatcaacgacaatattctttacattgacgaaaggagattcaaacaacaaaaatactatattacagatgtagacctgaagcaggctaaaaacgtcctgacaaaaacaatcacggccaaccacatttttaccgttctgcttgctgagaatcgagtggatgatacagtaacgaagaaactgaccgtaaaagaggcctttgacattgcgttaaagggtactgatttttcatatgtgctagaagagcctgaaagaaaattcgccaccgccgaagaagagaatttcggtgataaaaactccactgaattaatagatcagctcataaatgattatgagttagagcttgacgtggataattataaaattcatgtctataagaaaatggggaaagagattcctttcacatttgactcccgttataatatgccgggcatcagtatcaaaaccaactcgcaaaactgctctacccgtgcatggggatatggtgcgatgtctaaagacagtaagagcacagacaaaaaaccgaaatacgtatttgagccgatcttgtacattcatccagaggaaaagaaattcctgcgggaaggtaaaccgaagtgggccgacccgatcagagacgaaactataaaaaagtcgggcagcatggtttctgcgctgaaaaaacatgtgaatccatatccggaaacagtcgtcagtgtggattatcaatatgtatacgaaccaaaattgcttaaaattgaaaagccgttctggaaaggcgatacagtccacattttagccgacacagcagacggaacgacttatgaggatgatgtgcggctcttaacgatccaatacaatccgctaaatccatacagcagcccgaagctgacttttgccaatttcagaaaagatatacaagatattgcggtgaatcaagcgaagaagctgagagaacaaaaacgatatattgatcaaatactgacagcgctttgataggcgttttttattttgtcgaaaaggagagtgaatacagtgttgaggttgaaaaaaaattacgataccactagaaactctcgttatgaggatgagctatctggtgatatggaagcgatcgagagtagcgtaaacgggcttgaaagtgaaattacacgtcataagaaagctgctacggcgcatacatctgagcaaattgatcacgggggcttttctttacgaacttatattgacggactctataaccgggtgcgcaatctcattcttaatgccgacgggacaaatgtaaaagaagtagtggatgcccgtgttaatgctgatggggaaattgccccactgttgaaagagcgtctcgacaaggaatataacaaacttctacgtaagatcaccagaaacgttaacgtagacgactacggggccgaccctaccggggagacagacagcacagaagcattcaaaagagcgatcggaaacggaaaggtgcggctcaatctatcagccggagaatacgtgataaggggcgtaaagctgccgtcatggacgtatttgatcggccagggcatgggcgtcaccaagctaaaactgcacgaggacacgccggccagtgagtgggttgtcacaaatgctgatcatgcgaaaggcaaccggaatatcgttgtggaaggtatgtcgcttgactggaatcctgatcgtcagggcggcgtaagcgcaaccggaggtgtacattcaagctgtcttcttttcgcacaagtaaagtttggtattgcgcgcggcgttgaaggcattaatcccggcttacattgttttgatgtatcagcgccttcttatgacatcacagcaaaagattacacggcaacggggagcagatatatttggatcgacaagtgtgtcggctcggggtatggtgacgacggcattacgacccattacagcgagtatgttttcatcacaaacaatgtgatgacgaatccgcgcggcactgcacaccgtaaaggcggagccaattcaaacggaattgaagtggacgacggctctaagcatgtctgggttatagataattatacggaggggaatgtgcggggcgtagaggtaaaagctcataaggaatggccggcaccgagtgacgttcacattcgcggtcatgaatcatttcgtgacgttcgctcatttgatttacggcatattgatcaccatcttgtaaaagacccttggagcgagacggctcgtgatgtgacattagtagactgcacatcccgtgaacccgtctataattcgctttatgaaggattagctccgaaagcccttgtcgtttcggcgtaccagcgtgttcagataatcggttttaaagcgattggcgatccgacatatgactacaaagacagctcgatcattgccttccagtataagagcaggaagataacagtaaacaacttgcacattaccggatttaaaaaggctgattgtgacatttatattaccggcggcgatcagatgaccgacgatgtatttatttctgattttgttatacatgattccgcaagaaccggcattgcgatagggggcggtgtatataatgtcaacttgttaaatgggcttatgcatgtggcaagcggaacggccggcattacatccccgaacacccagaccaatatttttcttgtcagagcttacggttataaagatgcggctgtccttgccggagaaaagcattcagtcgttccgaataacgtcaagggaggctttcgagcagcttccagctccggccatgcacttacgaaatacagcgcgattattgcgtgtacggggccgacgtacgcgaaaggtgagcgcaacctgcttgcagggaacgccggcggctcttcctcagaaggctcacgcaacggtgtcatgttttcatacgattctcatacaacaggagacgggccgtcctcgggtgtcatgttctccaaggccactaagaacagcaaatcttacacaatggttttaggccatggaaacggcaaagcctccgaagccaacaaaaaaattgaatttaacgcaaagggcggaacagtcaaggccacaggcgccatcgagagcgtctcgaatttaaaagacttggcggagtattttgaatcagctgatggagcaaagatagaggcatcttatctggtagcgttagagggcgacaaaatccgaaaagcgcaagaaggcgacaagatactcggggtcgtttctaagactgccggcgttgtgcttggcggagctgccttctattggaatgatcgttttcttcgtgatgaatttggcggcattatctaccgggaagtatttgacggagaggacatcattacgattccagctgagaacccgaactatgatccggaagctgagtacaagccgcgagaggaacgagacgagtggcatattattggtttgattggtcaagtgttcgtgcgcgttgatgataccgttaacgtcggtgacagtgtttcagcagttgacgggatcgcgacaaaggcggaaagcggcggatacggaaccgtgatgagatttgaatccccgtacgatgcggaaaaaggatacggtgtggcgcaaatgatggttacgccgcagcactaaggagggataagcgacgatgtataaaacgggcagcgtgccgatcagcattaatacaaatccaatcaatggccagagtacaaatatacaatttatgacgcaagacacgggcagcgcaaagctgtttttttcttttacaaaggatggtgtaccgttgcctctgtcagccgtagacgcaaaaattgtcctcctgtatgatgatggatcgttttataaaaagagcctttccatcattgacaaggtaaatggaacagcggaatatgtgctgtcgaatgcagaactcaagcattacggaacggttaaggctgaaatcaaactatattacacgaacgggcaagcgctggcgacttcattttttactttctctatcgctaaaacgttagaagatcaaaatatcattccgacagctgactattacattgacgattttgaaacgctgagagacggggtaagccgcattgtggaagaaatcagccagactgtcgaggaattacaaaagaaatttgccgatcttgaagccattgaaacgaaagaaggcgcgcagcagaaggcggatgatgcagaggaaaaggccagagcttatacggatgaacatgcgaatgacgaagaaaagcatatcacggatgccgaaagaaaggcgtggaatgccaaggaaactccctccggcgcgcaaaagaaagtagacgcccatgcaaacgatcaagaaaagcatgtttctgcagcagatcggaaggcttgggacgccaaggaaaccccttcgggtgctcaggataaagtaaacctgcacgccaacaatacggacattcacgttacggccgaagatcaggcgtattgggatgatatgacccggcagttcaaagctcataattacaatcaagaacggcacatctcggcagttgagcggaagacatggaacggggccgccacctatgccaacatcatgctgaagaacggagccgccgcagggacgcggacaccgatgtatgcaaaatggggggcgtttttaatcttacgggggcatgtgaaaacagacgccgaaatcatattcggctccatccccgcggaatacgcacctgctggcggttccgttataacagtgccgttaagtggtacaggcggcacagccaatttgatcatttatgatgatggagacttgaaaataaaatacccggacccggcggactcaagtaagatgggtggaggctactatctggatgtggtcgtgggcttccaggaaggagggacagcatgattcaggtttatgaatatgatgaaaatttcattctaacccagcccctttcaattaaaccggatgaagaaggaaattatacaattcctgaaaattgcacaatcgtccagcctccttcttttataaaggcgatgtatcatccagctgagaagatatggacggagacggccacagaggaagagaaaaacgccctggaaaagcaaattgaaagcgggcgggtgccttctcccgtcgatgaattgaaagctcagaacgcggccattacaacacagcttgcggaagcgcagagcctggccgagtcacaagcgcaaatgatagccaatctttatctattgctggcggagggagggaaaggggtatgatggattggtttaaaagcgttaaaaccatctacggatgggggccgcagtattatagtaatgcagacgtggcccattttgttgagtggggaagaattacagaagacgaatacaaacaaataaccggcttgacctatccgatgacaaaacagcctgtcagtgtggatttaggcggcgccgcaaactgatcaacacccggagaggtgttttttattttgcctcgaaggaggtgataacaattggagggaatatacgtgtggatgaattttgagagcttacagatcgcaagagcatatctttttggggaggtgaaatatcttgatttaatgctggtgctgaacatcattgacatcattaccggtgtgataaaggcatggaaattcaaggagcttcggagccgtagcgcatggttcggctatgtgcgtaagatgctcagtttccttgtggttatcgtggcgaatgctattgatacgattatggatctgaacggcgtcctgacctttgcgaccgttcttttttatattgcaaatgaaggcctttccatcacagagaatttagcgcagatcggcgtgaaaattccggccgccatcactgaccggcttcatgtaattgaaagtgacaacgatcagaaaacagaaaaagaggacaaagctgctgagtaaatccggcggcttttttattactcaaaaggagacgatgaaacatggtgaaaatcactaaagactttattccagtggggcacaataacagaccgggatacgcaatgaacccgacatacatcacagttcataacacggcaaacacgacacaaggggcaagcgcagccatgcacgcccgttatgagaaaaatccggaaacacccaccagctggcactttacagtagacgacaaagagatttatcaacacctacccttgaatgaaagcggttggcacgcgggcgacggaaacggcaccggtaaccggaaatctatcggcattgaaatttgtgagaatagtgatggagattttgaaaaagccgtggcaaatgcgcaatggctgatcaaaaagctcatgaaggatcagggtatttcccttgcaaacgtggtccctcaccagcactggtccggcaagtattgtccgcgcaagctgcttgatcgatggggctcctttaaagcaggtatcagcggtgccccgtctaaaacggtaaaatctcctgttgataaaacaaaagaatcttatattaaaaatacagttattgctgacagccttaatgtgagaactcaacgcaatgccaactcgtctattgtgcttgctcttcctaaaggttcgactgtccaatataaaaaaggatcgactcaaaatggttggggttacattaaatataccaattctaaaggagccacatacagcggttacgttaacgtaaggtatatcaagagcgatgcagagttagggaaaaccccttcaaaatctgctcctgctaaatcttcaaacaagactagcgggggtattaagtctgtaggcaaaattaaaattgttggtgttaaaagtgcagccattattatggacaaaccagaccgtaaaaacgccaagaatgtggatacaattggtcttggcaagacaattaacatctcaggttctgttaaaggtacaaacaactctaaaggctattgggaagtcatccacggcggcaaacggcggtatgtgtctggacaatatggaaaaatggtttaagtaaagcgtttttaaaataacgaaaaagcccccttttgagggggttttattttggttcaatatttattattagcgatattgatggaattttagccatagtaacagagtagtccccatcaattgcatcaagaatttcttcgtcactttttaaaaggtcatataaatgatctttatcaattcctaaagtttgaaaaaccgcaaatatattagccagacctattggagaagccatattatctgaaccagaagtgattaactgtaaacggtagaatttatgattgttgtcataccatgctgccaaagtgaaagttccaccggagccatcagtatctgtttttagctctcttgtgtaaactgtaccatctttgacttcggtaagtttaaaatccccgatatcatctttattaattaggctaaggtcattgttttcaatatcttgggcagtttcattgaaagtttgtacaaattcatcaagactaaagttaaattctttttggctatcctcaacgctctgaacgtaagagtctccctcgtcttcagaattcattggctcctctgtagtgctttctgtggcagcagtgacatcctcggttttggatttgtgagaatctcgatttaacgtaaccataataaaaaaaagagataaagccaaaacaaggcttattggagctatttgtttacctactttcttagttttttcaaagaagataaaaatcaatgctgtaataaagacaaaggttgctaatattgcaataatgccaagaataatcatatgatccccctcttattttaaaacgaacgtttacattttaaagcaaatgaggattcatttctattctttgtaaagtctttgatgatgattgttatcactctttgaaagtgaaagcgtcgctgaagtaaggaaaagaaagctccttcttctaactaatatattaatagaactttaaaatgcaaaatggggtttcaacttaattggtaaatatgataatatttaacatgtaataaaattggtagaaaggaatgattaaaggaatgagaaagttgaagagtagtgcgattatcattttgtcgtcggtcgctcttttggtcactgtcctgttaagcactcctgccaacaccgtagaagcaaaatcaatcatgaagaatttaacgtcggaagagaagatcagtgaagcattaaaacaagttactgaggctgattacgaaaaggcagagaaatttgttcaaagcgcattaaaactcaacgatgattttacatacaccatagatgttgaaaaagctaaacaaattggctattcaagcgaagaattatttaatatgtccatgttttatgaaagcattccgagcaaacaagtaaaatggttagaggaaaacaaaggtgaaaaagttgaaatcaacggggatgcctcagcaacatttgtaccagctatcccttgggtagtttatattgctttgcaggagctgcttgcccttttgacagcaatcgggcttgctggattagctcaacagtttttgaaagaagtctataatgctggaatgaataaagcgtgcagaaaatttgcgaagaaaaacaaatatattaagagtttctgtaaggcaaacggttatccaactaaataagaaaaagcctcctgtaggggaggcttttttttattacctcagcacaagccataatgtcgtaacgacagcaaccataaagtaatctccgtcagtaagcttagtaccatttttaattaagacgttagctacccaattggcttttgttccttctgacgcattgagggctaccttctttccaacattgtaataaaccactttaaataaataatacactaacgtacagaacaaaaagagcaatatgaactttcctatgaacaataacacgcttcaatcactccctcctcacaatacccattattttaccaaataaggattttgtttaaaagaggatatagcctatccgaaaaaaactacttgtttagtttcccggtggcttttcttgcagcgtggaggcttatcttttttccgaacgtgctgttaaagcaggaagatgcccgtttgcccacagaatgcccactcttttttataaaacaaagcaaatcagagtaaaaaagaaaatgtctattacacatgaaatccttgatataatgctttttgtttgcaaatcaatcgcaatgaaaaccattgatgaaccattgatctgatggtcacgaagattcaaacgatccttgaacaaaatgcaattttgtaataccatagcatagacataaataactcagaccatattatgtataggctggaagggaatgagacagttcccttctttccctgtttataaaccgaaacatttgcagaaaacacacattcagtttaagataaacagtacctatatgggagagaagaacgaggactgccctgtgttctcattcttgattttttcgtttatgctctcatacataatcacacgttattgttgagggacaaccaccaaggagtgaaggaacatggcacaagaaaaagtttttccgatgactcacgaaggaaaacaaaaactagaacaagaattagagcaattgaaaacggttaaacgtaaagaagtagtagaacgaattaaaatcgcaagaagcttcggagatctgtcagagaactctgagtatgattctgcaaaagaagaacaggcatttgtggaagggcgcatcacgacgcttgaaaacatgatccgcaatgcgaaaatcatcgaggacgacggcggttcaaatgtagtcggtttgggaaaaaccgtatcattcatcgaattgccggacggtgaagaagaatcttacacgattgtcggaagcgctgaagccgatccgtttgaagggaaaatttcaaacgactcgccaatcgccaaaagcctgctcggcagaaaagtggacgaagaagtgacagttcagacgccgggcggagaaatgctcgtgaaaattgtgaaaatttcataagatccgtttaacaatgaaacacctcgtccaaaatgtggatgaggtgttttttatgatcgtatcaaaaaggctgaaaacggccgtgatttgttttctgcttgtgtttttctttctgcttgcgaggctggctgaaattcagctgttttttacagaatctttttcaaaatccaatattaatctgattcaggaaagcgtcaagcagcggacggaagaagtccttatttcagatggacgcggctcttttcttgatcggaacggcaaagaactgaccggaaaaaagcagcctgccgtcatactgtttccctttctcgtgacgcaggattggccggttgaccgggtatcagacattctcggaatgaaacagggggagctcaggcagctgctcacggaagcgaaaaaaccggtggtcctgaacagcagaaaaataaaacatttgacgaaacaatccgtgtcaaatatcaattctttgaaatatcccggcatttacggcgtatatatgaaagacagcaaagaaacaaacatagccgctcatctgttgggcgcgacaaaccaggaccctgagcttttgaaaaagaaataccccggcaggaaggaactgccgatcacggcaaagatcgggacaagcgggatggagcggacgtttgatgagtttttactggcggatcaggacacaaaacttttgtatcatgtcgacggaaggggaaaccctttattcggaatggacgtcaaatatacggctgaagcaaacgcgttttatccgctgcaagtcaaaacctccatcgaccgcaatattcaaaaagcaatggaagatgtattgaaagaccgcgggttaaaaaaggggggagccgtccttttagacattgaaaaaagcagtgtgctcggaatggtatcaaagcctgacgccgacatgtcaaagcagcagacactgcaaaattacatgctgacgccgatttatccgggatcagtatttaaaacggtgatcgccgcagctgcaatagaacaaaacgaagtgaagccgggcacatcctttaactgcaatctcaacctgtacggagagccgggggatgacaaaggcacgctcagttttggagaaagctttgcccaaagctgcaattatacgtttacaagccttgcggaaaaattgatcaaaaaagatgattccgttattgaaaacatggcggaaaaacttggtctcacccagcgggcgggctgggaaggcaagctgtaccgggaagacggattcaggcagctgtataatgaaaaaagcggggtcatttggggagatgacaaagacaaaaccgtaaaaaaagccgtcgcacagacggcgatcgggcaaaaaaacgtgaaagtcacgcctcttgaagtcgccaatatgatggcggcgatcgcgcgcggcggtgaaaaaaaacaagtcaaaatcgcggacaaaattgaatacaaaaacaaaacgacgatggcgtcattcaaagatcagccgttaaaaggggaaaacatcgacaaatatacggcgcagcagcttcaaaaaattctcagagaagtcgtcacctcaccgaaaggaaccggccgaaggtttcaggatctgccgtatgagatagcaggcaaatcgggaacggcccagacgggaatgttcacaaaagaaaaacagacgctttaccacaaatggtttgcgggatactttcccgcggacaagccgaaatatgctctcgtggtgctgcacatggacacgccgggggataaggctctgacaaatacagtgttttatgatattgttaaaaaggtacatgaaaatgaaataaatcagacatagaacaaccgctcagcccatgttaaaatatatgctgagcaagagggataaaggagtgcagaatgattgagcaataaacaatctcgttttgaaaaccgtgataagcgcagaaaagcaaatatggtgcttaacattttaattgctatcgtatctattcttattgtcgtcgttgccgtcagcctcttcatcaacagtccgtcgagcgacgtgagcgaaaaagcggacacgagccagaagcaggaaacacctgcatcaggcaagacgaagcagacatcggatgaagacataaaagacagcaaaaaagatacggcatcagacgatgacaaaaaagataaacaggataaggacacatctgattcatcttcagactctgacagcaaaaaagacgatgattcatcgaaaagtgatgacagcagcaaaaaagactctgattcaagcgatccttttaaaggcgcaaaaataacagagggcggctcatcaagcgatgtcgagaaaacaattgttaacccaaaatggaaagcggtcggcacaaagcagacgggagaacatgcggcgacgtatgactcaagctctgaagactggtccgaaatgcttgacgccatctcgtacgcaacaggcgtgtcaaaagatcatatgacagtgctgtggctcggaaacaatggaagcccgcaagatgcgaagggtaaagttttagacaaaacgaacggcaaaaagtatcaggttaccatcacttggaaagacaaaaaaggctggaagccgacaaaagtagaaaccttaaaataaccgcaaaaaagcagctgattaatcagctgcttttttttgtcatacgtcagctgaaaaatgcaccgacgcgctgtaaaggattctgccgtcaacggccgtcacctgatgggatacggaacggacgcgaagcataatcgcctggttgttttcaatctgaacgtttattttcttttcaagctcctgcaaagatgccgcttcgaaaaattctactttatctttgattaaatccaattgaaaattcatcagtacagatcctcctgatttttcttctgagtcaatgaaagtataagcctttctgccgtaattgcgcaataatcccaaagtattttagtacccttccattcttttttgtgataggataggaactgttccacgattaatccatactatacacataggaattataaattatggagagtgaaaaatatgggccgtgaatttattcctttatttgaagattgggcagcgacttatgatgccacagtgcacggggctgacaaacaatatgccgctgtttttaaaggatatgacaacattcttgacagcattgtcgcactttcaggttcaaacgttttagagttcggaccgggaacggggaatttaacggcgaaattagccgctgcgaacaaaaaggtgtttggtgtagaaccgtctccgtcaatgagaaaactggcggctgacaagctttctgacaaagccgtgttcagtgacggagattttctggagtttcccgctccgccttttcaaatagataccatcgtcagctcgtacgcctttcatcatttaaccgatgaagaaaagcgaacggctgtaaagcagtatggcgcaatccttcagaagcatgataaaatagtgtttgccgataccgtctttaaagatcatgaagcttatgatgaagccattaaaaaagcaatccgaaacggctatcatcaattagcggatgatttaaagacggaacattatccgacactcgggacaatgaaaaacatcttttcagaagagggatttgccgcgcggtttacgcagcaaaatgactttgtctggataatggaggcgattaaacggtaattcgaagggattgtgtataaatgaaactggcagtcatcggagcaatggaagaggaagttacgattttaagaagcaaactgaaagacgcaaaacaggagatgatcgctcactgtgagtttacaactggcagctatgaaggcgttgaagtcatcttgctgaaatcgggtatcgggaaagtcaacgcggcgattagcacgacgcttctgcttgaccgtttcaaacctgattatgtgattaacacaggctcagcgggcggttttcatcatacattgaatgtaggcgacgtcgtcatctcaacagatgtccgccatcatgacgtggatgtgacggcgtttgactatgaatacggacaggtgccgggtcttccggcagcatacaaagctgatgaaaagcttatcagcattactgaggaagcggtttctgaactgaacggcattcaagtcgccaaaggcacaatcgcaacgggagattcttttatgaatgatccgaagcgggttgaagacgtacgcgccaaatttgcggatttgtacgcggttgaaatggaagctgcggctgtcgcacaagtgtgccaccagttcaaaacgccttttgttgtcatcagagctttatctgatattgccggaaaagaatctgacgtttcatttgataaatttttagaacaggctgccgttcattcaactgagcttgtcctgaatgtcatcaaacgaattcactaagcgggggattctcgttctcctccgcttttccaggaggaggacatatattgaacgtgataacagatattacagaactgatcggaaatacaccgctgctccgtctcaagcattttgatctaccggagggaacagcggtttatgctaagcttgagatgatgaatccgggcggaagtattaaagacaggctgggcgggatgctcattgaagatgcgcttcgcacgggaaaggtgaaaccgggcggcgttatcattgaggcgactgccggaaacaccgggatcggactcgctctgtgcgccagaaagcatcagcttcgcgccgttttttgcgtcccggagcatttcagcagagaaaagcagcaaattatgaaagctctcggagcggacatcgtgcatacgccgagagaagaaggcatgcagggagccatccgaaaagcgcttgaactggagagagaaattaataattcttatgccgttctgcaatttaaaaaccgagtaaatccattgacttactacaaaacgatcggacctgaaatatggaacgcgctcggcggggatatccacgcttttgtcgcaggagcgggttccggcggcacctttgccggtacggcagcttatttaaaggagaaaaatcctgctgtcaaaacggtgatcgttgaaccggaaggctcgatcctgaatggcggagagccgcatgcccataaaacggaaggcatcggcatggagtttatcccggattatatggacgagaaccattttgacgccatttacacggtggaagacgatacggcgttttcgctagtcagagaagcggccgagaaagaaggcctcttaatcggaagctcttcaggggcggctctttatgcagcgcttgaagaagcgaaaaaagcgcccgccggatcaaatatcgtcaccattttccctgacggcagcgatcgatatataagcaaaaacatttttcaaggaggtcagtaagatgaagaaaaaaacgctgatggtgcacggaggaattacgggagatgaaaaaacaggagcggtttccgtaccgatttatcaagtaagcacgtaccggcagccgaaagcgggcgagcacacgggttatgaatactcaagaacggccaatccgacgcggacggcgcttgaaagcttaattgcggagcttgaaggcggcgcggcgggatatgcgttcggctcaggcatggctgcgattactgccgtcatgatgctgtttgacagcggcgatcatgttattttgacggatgatgtatacggcggcacttaccgggtgatgacaggcgtgctgaaccgtttcggcattgaagcggactttgtcgatacgagcagcaaagaaaaagtcaaaaaggccattcgcccgaatacgaaagccatttatatcgaaacaccgacaaacccgctattgaaagtgactgacctcaaactgatgtctgacatcgcaaaagaagcgggtgtattgcttatcgtcgataatacgttttacacgccgtatttccagcagccgctcagcttcggcgcggacatcgtgcttcacagcgcgacaaaatatctcggcggccacagcgatgtcgtcggcggcttagtcgtcacggctgataaagaactgggcgaaaagcttcattatgtgcaaaactcaacgggcggcgttttaggaccgcaggattcatggcttttgatgagaggcattaaaacgctgggactcagaatggatgccatcaatcacagcgccggaaaaatcgccgagctgcttgaagcgcatgatgccgttcagacgctctactatcccggatcagcgaaacacccgggccatgagctgacaaaagcacaaagctccggtttcggcggaatgatttcctttgatgtcggcagcagcgaacgcgtcgacgcgtttttagaaaaattgaacctgtttacgatcgcggaaagtttaggagcggttgaaagcttaatctccgtgccgtccagaatgacgcacgcatcgatcccgcgcgaccgccggcttgcgcttggcattaccgacgggctcgtgcggatctcggtcggtattgaggatactgaggatttaacggcggatgtgaaacaggcgcttgattcacttttataaagaatggatagatttacattctctgtcggctgtcagcttgtattataatgttggtagactataaaactggcaggtgaccttatatggagaagaaaagactgaaatcattaatagaagattttaagcattacgcatttattctgcttgcagtcagcaccttcatttatatcggcgcggttcttcccggacaagggctgactgcgggccagaaaatgctgatgtttgtaacggattgtgtatttttagcgggcgcttatttctgcgttgaccgttcacttatttataaaaagaggctggaagaggccgaagaataaaaaaaagccattgtcttttgacaatggctttttcgtttcttattcagacggggtttcgcgtaattcttttcccattccttttaaaaactgcagcccgaagccgagcgcccggttaatatcaggatcaccgacggctttcatcagttcaaacatactgactttcctgtcctcttttaaaaatctttgcgcctgatccgtcccggccatggcgctttctaaaagtctgcccataaattcgggatcagcttttgacagcgcgcctcccgcggccatcatcgtattcaggagattggtgacaggttcccgggaaatctgtccgagtgcgattttggcaatctcctcttttgcctggagcatatagccggcggcatcaaaaatgcccaagccattcagctctgccatgatggacatcgttttcgcgacggcttcttcattttctgcgagaagcgtcttcagttcttccagtttttcagctttcagctgttcctctgttttcgtttctttttgaatttcagtaattgggcttgccataatgtttcctcctttccttaatcagttaagtgcacatagcccggacggttccattttcgctgagcttccacaccgttttgcggatgacgttttttgttccgcggattcgttttcggaagcggcggagtatcacaggaaccaagcacttccatgcggacttttgtctgcttataggcaggtgtatgtgtccgtgaatcatacgcaggcccggtcaggaaattaatcgcagaatctttatctgtagagttcatcggcagataaagctcatttgcgcggactcggtctgtcacaagcgcgttcaatttaaccgccccaaaaggagagacgagccggatcattgtcccgtcgcaaattccgcgttcagccgcgagctccggcgatacttcaacaaatacatccggaactttagactgaatgccttttgacttgtttgtcatgtttccttcgtggaaatgttcaagcatccgtccattgttaatatgcaggtcatattcttcagggaatacagcaggctccacccaatcgctcagcgcaaaacgggcttttttgtccgggaagttaaagccgtcttcataaagaagcggagtgctttctcccgtaaagcttccccataggaagctgttccagccgctaagaacgtcgtagcttgcttttccgaacagcggagaaaggctcgccatttctgagaaaatgtcgctaggatgcgtgtaattccaatcagcgcctaaacgattggcgacttcctgaataatccaccagtcgggttttgcatcgccgagtgtcggaagcgcctgatacaacctttgcacacgccgctctgtgtttgtaaatgttccgtctttttcaagagatggaaccgcaggcaggatgacatccgcgtattgcgccgttcttgaaaggaaaatatcctgcacaacaaagaaatcaaggctggataaaatgtcatgaacatggttggcgtttgaatcaacgagcgccatatcttcaccgacgagatacatggctttcatgtttccttcttcaatcgcatggagcatttcgatattatcaagacccggcttgccgtcaatttcaacaccgtaagctttttcgaatttagcgcgtgccgcatcatcggtaatatgctgataccccggaagccagcctggaagagttcccatatcgcaagcgccttgaacgttgttatgtccccgcagcggataggctccggcgcccggacggcggtagtttcctgtggcaagcagcaggttggaaatcgccgctgatgtatcagagccgcctgtattttgagtaacgcccatgccccaaagaacacaagtgccgtctgcatcacgaatcatttcggcaatgcggatgatcgtatcctgagaaagtccggtgatgcgctccgcatattccaatgtgtatttttccagcgtttctttataatcatcaaagtagttgacattttcatcaataaacgcttgatcgtgccagccttggtcaatcatatatttcgttactgccatgagccagacctggtcagtcccttgtttcgggctgataaagaggtcggaccgttcagccatttcatttctgcgcagatcggcaacaatcagtttttggccgtgcagtttatgcgcgcgtttcacgcgtgtggccagaaccggatgtccttccgccggattggcgccgacgatgagcacgaggcccgcttttgcgatatctttaattgtgccggcgtctccgcccataccgacggtgcggaataagccgtccgttgccggtgactggcagtagcgtgagcagttatccacgttgttggtttcaaatacttgacgtgccaatttttgaatgacgtagttgtcttcattcgtaattttagaagaagaaataaaaccgacagaaccatttccgtgttcggccttgatcgaaccgagtcttgaagcgacaagatcaagagcttcttcccatgacgattcaacaaatgcgccgtttttccggatgagcggttttgtaatccgttcttccgaattcacgaagtcccagccgaatttccctttcacacatgtggaaatcgcgttaaccggagcatcggaaacaggctgaattttaaggatgtcacgtccttttgtccatacttcaaaagagcatccgacgccgcagaacgtgcagactgtttttgtttttttcgtccgtttatcgcgcatagccgcttccacttcagacacggcgaagatgcttgtatagtcgggttcaacatttttcactaaatcaatcatcggttccatgacatcttcttttattcctgtcataaatccggcttggccgagcattgatttttccatcagggcgttacaaggacagacagtgacacactggccgcagctgacgcaggaagattcattaatggcgacgccttcatcccaaatgacccgcgggcggtcgcgctcccaatcaattgaaagggtctcattcacctgaaggttttgacacacttccacacattggccgcaggcgatgcattggttcggatcatagcggtaaaacgggtgagacatatcaaccgcgcactttgaatcatctttcggcgtatacggatatttctgatgttcaattcccatcatttccgctgtattatggagtgtgcagttgccgttgttgttatcgcataccgtacagtaaagcaggtgattctcgagcaggcggtccatggcctctgtctgagcctcttttacccttcccgacgtaagcgagatggacatcccgttttctgcagccgtggaacaagagcgctgcaatttcccgtttacttcaacaatacaggtgtcacatgtttgaatcggatccacttccggtacatggcatatttgcggaatctcaattccgttttggtttaaaatatctaaaatcttagacccctctggtgcttcatactccgtgccgtcaattttgacacggatagactgaacgtctgtcacttccaattcccctccatcttttaaactcgaaaaaagccatgcacatagataccggcctcctgtccggagaacggtataaatacgcatggcggaatagttcactagcaagtcttactaacagaccaatcctatttgtataaaacgatagactcataacacgtttcctattacaaatccatcttcactgcttttattataaggtgatatttattataatacaatacgaaaggaaaactttaaccaagtgaaatgtcacaaaggggaaccgggaatgtctttcataggctaaaatcggaggggacaatatgtctaaaaaaattcatgaatttaacgatattatccggaaattgcgcaaagaattatttggaaaggggcctgaacgaattcacaccgtttttgtggataacatggcggtatctacactttacggcaatctaagcgcaagtgagcagtttatcgcacgcacgcctgaaggaagagaaatggttcatgcggcgcgaaccagcttaattcaggagctgtattcaaaacaaacgcctgacggaatggaagagctcatcggagcaaagcttgtgcatctgttttcagatattaaaatagaggaaaatattgctgtatcggtgtttgtctttgaccgctcaattgaagagcataaagaagaaatcaaaagctgacaatattcaattgacacgaaattgtcacatttgatatgatatgaactgccagcagtggcctaaggacgattttttatggaatgtgtgcatgatctgtacatattctataccgcatattttcattctgcttgatattgttgtatgggtatgcatacaagttaggcagcattcaaaccccgttttttcagacgggttagttgaatgctgccttttttgttaggcgtctttggaaactgcgggctgaaatgataaatggaggggttattatggcttttcgtaaaccggacgaaatagcggagcttgcggtcgaatcaggggtaaaaaaggtgcattcaccgctttcagcactgattgtattaggatttttgggaggagcgtttatcgcactcggttatttgcttgatatccgtgtcatcggcgaccttccgaaagaatggggaagcctgtcgagtttaatcggggcgtccgtgtttcccatcggattggtgctcgtcgttcttgccggcgcggagctgattacgggaaatatgatgtcggtatccatggcgctgttttccagaagaatatccgccggtgcattagtgaaaaattgggtgatcgtgacgttgatgaatcttgtcggcgcactgtttgtcgcttactttttcggacatgttgtcggattaaccgaaacaggaccttacttggaaaaaacaattgcggtcgcacaaggcaaattggatatgccgtttggaaaagtcattgtttcggcgatcggctgtaactggcttgtctgtttggccgtctggctttctttcggcgcagaagacggagccggaaaaatcgcgggtatatggtttccgattatggcgtttgtcgcaattggttttcagcacgttgtagccaatatgtttatcatcccggctgcgatatttgcaggctctttttcgtggggtgatctgattggcaatctcattccggcctttatcgggaatgtcatcggcggggcagtgtttgtcggccttatttattttattgcatattcaaaaaaagatcagaaaaagcaagggatgaaaagagtttcctgaggtaagaaagatgccggaaaacatggacaattgaagcggaatgccagcacattttccgtccaaatcttgaaaaaaatgtttacaaaatggaagctgatggatatacttacaaagtaagaaaaaagcaaagggaggttgaatcacatgacgacgttaaacggcaatcaaaatctacaattgaaccgattcagcctgtggaagagttcgtgtccttccttaacctctgcccgtcaagcacgttaatttcggagtatcaggacattcgcagctccccgcagggaaagaagcacagtcttcttttgtctgcggatttagtctgcccgcagcgcatatgaactttgctgcgggttattttcgcttgtgcggatattgaaagggggtgagcgataatgaccattaatcttttctttttaacactgaccatttcaaagcgttttaaaagtgcggaagagtatgaacgagaacagcaggtcgaagagttttataatgaagcgaaagaacgccagctgaaacatttttatatgaactaacggacacgaagggccaaaacggaggagaaggaggagatcatcatgttcagaattgaactgctgaatcattacacaatggagaaggaccaggtttagcgaggatgttgctgtcacgtcgcagacggcctgcataccatggtaaagaaagaaaaattggtaagcgggtgatagcatgcaaggcggtcagaacagaattccatccatcgggcacgggtatgcgtcaatgccccattcatttaaacacggctacggcaacccgtatcgccggcagagaatggcggcgctttcccggcagacaagatatatagcaccgtattattggtactagagcaggcggaaaacctacgttttccgtctttttttttatgaaaacaaatataaatttcaaataaatcgaaacgttcatgaagagaagtgcgtctagttagtacctcatactaatacgaggtaatattatttctgaataataaatcacaggaatggaaaagcgggtgttatacaatgttgcaacacacatcttcagcattaaaacgaatgcgcgcgaaatactttgctgcatcagaaccggcagagtcagtcattcagcaaatcttgatggacatacaggaatacgaccgcattttggaaatcgggaccggaaacggctcaatgtttaaacaaatcatcggacagcttgaaaagggcagtcttaaaagcatagaaacatcgaaacgtaaaatacggaaaacacagcgcgcaaaccgttcggttataaaagccgggctcggaaacattcagcaggggaggccggaaagcataccgttccgcgaccgcagttttcataaagtcttctcgttacatactgctgaaacagtcagcgattaccgcacggcatgtaaagaagtgtaccgcgttcttcaaattgacgggtgtttctatatggttttgaaaccttcgcggatgagtgaaaaggatgtgattgaggtgctctatgatcagcatttcagagacatttcagttgtcagcagagattcattccattttattactgccattaaatagaatatttcttgggaaataaaaagagctgcttaagtcactgcagctctttttgtgaaattgggcatatttccttatttttggttatttcacatatattttatattaaaaaaagtttttttcttatacaatggtaatcagatgaccgtacattttaaatattttgaacaaacggaatgaatattcattccgcatttagaaagggggatgaaatgacagcttcaaataaggttgaactcattatgaaagcgtcgcttactttgtttacagatagaggatttgacgccacgacgattccgatgattgccgctcaggccgatgtcggaaccggcacaatttaccgttactttgacagtaaagagacacttgtgaacgtactgtatcaggaaagtgcgcagcgttttatgaaaaaagtcaaaacggactttcaggggatatctgtaagagaagggtttcatcacctgttttattgtctgattgattttacgaaggaaagtgagtatgcattgttttttcttgaaacgaataaggacgcctactttctgaatgaaacgagccgtaagcttcttgatgaaataacacagatgcttgacgtcttttttcagcgcggcaagtctgaaggcgtgctccgcaatctgccgtccaatgtgctgatggggctgctgctcggggcatatctcaaactctatcagcttatccggacgggaagcgtcgaaataacaaaaccgtttctgaaagaattggaacaatgttcttgggatgccatcagaactcattaattattcgccgaaggaaggaagatcgatatgaaacagctaagcgctataccgcagccgaaaacatacggacctctgaaaaatctccctcacttggaaaaagaaaaactgtcacaatcgctctggaaaattgccgaagaatacggcccgatctttcgttttgaatttccgagctctgtcggggtcttcgtatcaggccgcgagctcgcggcagaagtctgtgatgaaaagcgatttgacaaaaatctcagcaaagccctgctgaaggtccgtgagtttggcggtgacggactatttacgagctggactcacgaaaagaattggcagaaagcgcatcggattttattgccgagcttcagccagaaggcgatgaaaggctatcattcaatgatgctggatattgccatgcagctcgtgcagaagtggagcagattaaatccgaatgaagaaattgacgttgccgaagatatgacgcgcctgacgctggatacaatcggcctgtgcggatttcattaccgctttaacagcttttaccgcgacacacagcatccttttatcacaagtatgcttcgtgcgctgcaggaggcaatgcgccaatcacaaagacacagcctgcaggacaagctgatgatcaaaacgagacatcagttccagcaggatattgaagagatgaattcgcttgtagaccggatcatcgctgagcggagggaaaatccggatgagaatctgtctgaccttttagcattgatgcttgaagcgaaagaccctgtaacaggggaaaggctggatgatgaaaatatccgttatcaaatcattacctttttgatcgctgggcatgaaaccacaagcgggctgctttcttttgcgatatactgcctgctgaaaaataaagataaattgaaaaaagccgttcaggaagccgagcgggtgctgacgggagagacccctgaatataagcagattcagcagctgacatatatccgcatggtgctaaacgagactttgcggctgtatccgactgccccggcattttctctgtacgcgaaagaagatacggttctcggcgggaaatatccgattgcgaagggacagccggtgacgattctgactccgcagctgcaccgggataaaagcgcgtggggagaagatgccgagttattccgtccggaaaggttcagcgatcccgcggccattccggctgatgcgtataagccgttcggaaacggacagcgcgcatgcatcgggatgcagtttgccctgcaggaagcgacaatggtgctcggccttgtcctgaaacactttgaactgattgatcatactgattatgagcttacgattaaagaagctctaaccattaagcccggtgattttaaaatccgtgtgaaaaacaaggacgtgtccaatcatcagcccgtacaaaaccataaagctgaaggcagcggtcacaaagaagaaacgaaagaaatcccgtcccacggaacgccgcttctcattctttacggatcaaatttaggaactgcggaaggaatcgcggaagagctggctgatatcggaagaagcaaaggattttcaactgaaaccggcccgctcgatgattatgccgggaaactgcctgtaaaaggcgcggtcgttattgttacggcttcttataacggggcgccgcctgataatgcggcgggttttgtgaaatggatggaaacccttgaagatcaggaattaaagggtgtttcttacgccgtcttcggctgcggagaccgcaactgggccgccacttaccaaaggatcccccgcctgatagacaaagtgcttgaagaaaaaggggcaaaacggctgacctctatcggggagggcgacaatgccgatgattttgagtacagtcaggaagtctgggaagactcattctggaaggacatcatgaaggcttttcatatagaggccgctccaaaacagacaaacaaatcacagctatcaatcgaatacgtaagtgaagcagccgagacgccgattgccaaaacgtacaaagcatttgaggcagaggtcatcacgaacaaagagcttcataccgaaagcagcaagcgctcagtccggcatattgagctgcgtctccctgaaacagaaacgtatcaggaaggagatcatctcggggtgcttccgcaaaacagcggggaactgatcagccgtgtcattcgccgattcggtcttgatccgaaccagcactttaagatcaagggccggcagctgcctcatctgccgatggaccggccggttaatgcgccggagcttttggcgtcctatgtagagctgcaggagccggcaacgagagcccagcttcgcgaacttgccgcacataccgtgtgcccgccgcaccaaaaagaattggagcatctttattctgatgatgcggcatataaagaaaacgtgctgaaaaaacgaatgaccatgctggacctgcttgaagattatcctgcatgtgaactgccgtttgagcgctttttagaacttctgccgtccttaaaggcgcgctattattcaatctcaagctcaccgaaggcagccagcggggagctcagtatcacagtcggcgttgtgacggctccggcatggagcggccgtggggaataccggggcgtggcttcgaactatttagccggattacaaaaaggcgattctgccgtctgtttcatccgctcgccgcagtcgggtttcgcattgcctgaaaatccgaaaacgcctctcattatggtcggagcaggcacaggaattgcgccgttcaggggatttatccaggcgcgggctgccgaaaaaatgtccggtaacagcctgggcgaagctcatttatacttcggctgcaggcatcctgaagaagacgatctgtacaaagatgaattcgaccatgcggagaaaaacggccttgtcaccgtgcatcgggcgtattccaggttaaatcaggactgtaaagtatatgtacaggatgttctgcttcgcgaggctgcacaaattattgcccttcttgaccaaggcggccatctctatatatgcggtgacggaagcaaaatggctccggctgtcgaaaatgtactgcttcaggcgtatgaaaaggtgcataacactgattcaaaagtttccttggagtggcttgaacagctgcaggcggaaggaagatatgcgaaagatgtttgggcaggtatgtaacagaagagtgagacaactgaagaatgttttttaattgaagaaagccggcacgatatttgaaatctactgaatcaaaaggaatagttatagggagtatcgtgccggccttatctttagtatcggacaaaaggcacaaatctttaatgtttttattgatttacatgcaggcggctatgtcccttttttctgaattccgccagaaataaaaccggataagacagcaatagcaaaaccgaaataaatgaaatgataccgatccaatgaaaatgcgtccaaaagaaaccgccgcaagaccctgccacgcttgaaccgatatagtatgcaagcagatataatgaagaggcttgcgcacgatgatcaccggctgcgcggccgacccaggcgcttgcgatcgaatgcgcgccgaaaaagccgaaggtaaagacggcaatccccgcgattttaagcgcaagctggggcaaaagtgtcaccgctgcgccggcaagcataacaaaaatcgcaatcttaatcattttcgcgcttccgaaaagatctgcttttttccccatatagaccgagctgaacgttcccgcgagatagacaataaaaataaaaccgatcacagtctgcgacaaatgataaggagccgccattaaatgaaagccgatataattatataatgtcacaaaactccccattaatataaatcccagagatattaacaaaagcagccgtttgcggtgcaggaccgctccgtattccttacatgccgattttacgcccgcatgccgctgagatgaatggcgcggagccggaagaaaacgccaaaacaaatagcttaatacaatagaaagaatgccgatgatggcaagcgccggccgccagccgaatacatcggtcagaagccccgttaacagcctgccgctcattcccccgatgcttgtgccgctgatatacaagcccatcatttttccgaggcccttcggatcaaactcctcgcctacatatgtcatagcgacagccggaacgcctgccaggaaaataccgagcagcgctctcatcgccaaaagcgcgggaaaagccggactgaacgctgttaatagacctaaaacagaagtagctgttaacgacagcaccattaatttttttctgccgaatccgtcagacaacgaagcggcggccaataatgaaaatgccaaaacggctgttgagatggataaagttaagctggcagccgcagcggaaatatgaaactcttccgaaaacaaaggcataagcggctgtgtcgtgtaaagcgtggcgaaggtcacaaagccgctgataaacagagccaagctggcctttctgtaagcctttgtatgaggctgaataaacgtcatgaatgtccctcttttctcactgttggttatatatgtatcgtacgcttttcatttcaatgtgtctaatttataataactatagaattaatgcgtgtaggttatgaagaaaggggagaaggagaaaatggagcttcatcaaattgacaacttcattgcggcggcaactcatcagcatttcacaaatgcggcaaaagaaagaatgatttctcagccggcattaagccgatcgattatcaggctcgaagaagaattaggcgcgccgttattttacagagagacaaaagccgtccggctgacaaggcacggagagcagttcttaataaaagcaaaacaagcgagacgagctttaaatgaaggcgttgaacaagtgaaaaagaatatgagcctggagcacggcgaaatatctgtatcttttcttcatacgctcgggctgcgcttaatgcctcagctgattgccgaatttaaaaagctatacccaaacgtgaccttccggctttatcaaggcgcaaatgaaacgcttcgcaaaatggtggaaacgggagatgcggatatctgtctcagctccccgccgcttcccagcgagcttttacaatggacagtgctggagaaagagcctctatatgcggtgctacctgagaaccacccgcttgcaggaaataaaagcattcaaatgaaagagatgcaggacgaggattttgtgggttttaaaccgggatacgggctgaggtatatgtttgatctgatgtgccgggatttgaatatacacccgcatctcgcatttgaaggagaggaagtgtcaaccatattaggactgaccgccgcgggtctgggggctgcagtgctgccgaaaaccgcggagcattcatactttccggtcgtttttctaccggttgcagattaccaatgcgaacgcaccatagcgttagcccagctgaaaaaccattcactctctcccgctgctgagcgttttaaacagtttgcacttgagtattacaaagcacgcaactgagcggtcattttattaaaatcgaagttgaaaataaagcagaaagaaatacaaaaacggaggaaaaccatggcgaaaaaaacagtgaaaacaaatgctgtccgtatcattgagcagcaaaacattccctatgagctattaggttacaaaacagaagggggacagcccgcagacggtctttctgtttcacaaaaaatcggatacgctgccgaatatgtttataaaaccttagtggcatctgcaggtactgatcgttattacgtctttgtcgttcccgttgcaaaagaactgaatctgaaaaaagctgcgaaggcggcaggtgagaagaaaatagaaatgattgccatgaaggaccttttgggagtaaccggctatatgcgcggcggctgctctccgatcggcatgaaaaaaaggtttccgacttttattgatagatccgctgaaacactggagtttatgattgtcagtgcggggaaaatcggaatgcagctgaaagcagcgcctcaagatttagccgaagcaagcggggcggtatttacagacattgtataaatgtccgatgaatctaatagaacacgtgtcaagggagaatgataatgataaaaagatatgaaaacttgaatggcgtgaagaatgaacatggattcagggacatgtggaaatggatgaaagaacgaagagaaaaaagtaaagacttaagcgagaacattccgaaagcggtcacaagggatgtccgtgatgttgccgtcaatcggacggaaaccgccataacatggatcggccattcttcgtttctgatccaaatacaggggcttaacataatgaccgaccctgtatgggcgcggaggatgggttttcaaaaacggctgacagagccgggatatgaattgagcgaactgcctgacattgatgccgtgctcatttcacacgggcattatgaccatcttgattttccgagtataaaaaaactgagaggaaacccggatttttacgtgcctgcgggattgaaaaagctgttcaacaaaaaaggccgcaaaaaggttcatgaaatgaattggtgggatcgttttgagatgcggggggtgaacatatcatttgttccggcccagcactggacacggagaacgctttgggataccgatacctctcattggggaggctgggtcatagaaagcaaaaacggcgagtccatctattttgcaggagatacaggctattttgaaggctttaaagaaatcggagagaggtttcgtattaaggcggctctgatgccgatcggagcatacgaaccggaatggtttatgcaagtgtcacatatcaatccggaagacgccgtgaaagcgtttttggagctgaaggctgacagcttcattcccatgcattacggggcattccggcttgctgatgatacaggcccggaagcattaagcagactgcacggcgagtgggatcggcttgcattacctcctgaaaacctgaaagcgttagcgcttggcgaaacattttggctgtaacagcaggttttcgctgccgacaccaatcgtttaaaaacggttggtgttttgacgtcaatcaaaggtgaattgtctctgtataaaacatgatttttccggaacctgcggtaaaaaacaaaactttttactcttttgtttcactataaaatgaaaacggtttcgtatgcgcagtatatttaacctatcacaattgctccagcagaaacggacaggaaggatagaaaaacagatgaaatacatgaattcaaggcagaaaaagattttgtatctgttgttatctgaacctgatgactacttagttgtgcaagatttcgcagacagggtccgctgttctgaaaaaacgatcaggaatgatttgaaaacgattgaagatttcctgaatgaacatgctcaagctcagctgatccgcaaaccgggattaggcgtctatttacatatatcggaacaggaaaggtcacggttaagccggcaaatttataatgagcactttacgtgcaggcacaagaccgatgaagaaagaatacttcacatcgcttatgatttattaatgaattcaaagcccatttccgcaaaagaaattgccgcacagcattttgtaaacagagcttccattaaaaaggatgtaagtgcggttgaagagtggctgaagcgatttgatctcacgctggtttctaaacagcggctcggcttaaagattgaaggggacgaaaaaaacaaaagaaaagcattggcgcgaatttcagatttgattgataatgcggaatttacaagccaatttataaaaagtaagtttttaagttatgaagcggactttgtgagaagagaaatcaagttattacaaaaaaaccattctatctattttacggatgaaacatttgaaagtttgctgctgcatacattgctgactatccgccgtatcaaaatgaaacagccggtcgccatttctgcaagacagctggacgcggtaaaaaagaagaaagaatatgaatggacactggcttgtttaaaacggcttgagccggtatttgccatccggtttcctgaggaagaagccgtctatttaactttacatataataggcgggaaagtccgctatccatcgcagcaagaaaagaagcttgatcttgaagattctgagctttccaaagtcgtcaggcatttgatcaatcgtgtttcagaattgcaaatgctggattttcataaagaccaggaactgatcaacggattgaacattcatctcgatccggtgttgaagcggctgagctatgatctctctgtttcaaaccccatgcttcacgacatcaaaaaaatgtacccttatttgtttcatcttatcattgacgttttagaagacatcaatcaaacatttgatctttatattcctgaagaagaggcggcctatttgacgctgcattttcaggcagcgatcgaacggctgcgccgaagcagtcataaccctaaaaggacgatcatcgtctgccatatgggcattggcatgtcgcaattgctgcggactaaaattgaacgcaaatttcatcacattacggtaaaagactgtatcgcaaaagcggagctgacagagtatatcaaaaagcataaagatatagatttcgtcatttctacgatagggcttggaaatgtaacgatccctcatattgtcgtatcaccgcttttggagtctgctgatgaaaagaagctcagcgcatttatgcaacagcttaatacatcacaccgccgggagcaaaaaacgtttaaaatgctgaacgacacgactccgtttctcgtttttttacagcaagagacagagcaccgttatcaggtcattgaaaagctggcgcaggctttgtatgaaaaaggctatgtagaaaaagagtatggcattcatgcagtaatgagagaaaaaatgtcggcgacaaatatcggggcgggtattgccatccctcacgcgaactctagatatataaaacaatcagccattgcaatcgccaccttaaaagagccgattgagtgggggacagaaaaggtgtcgctcgtttttatgcttgccgtcaaacacgaagatcaaaacaaggtaaagcaattattcagtgagctttcctatcttagcgagcagccggcatttattcaaaaactgacggaagaaaaaaatgtgatgacgtttttatcgtatttaaactattaaaagcagggaatggctccctgctttttttctgtttatagggaaaaatgccgttatttccggaacttatggtaaaaaaacgcgcttatcacaggctgatttcagtataaagttgagacaagatcttgaaattcagactgcaaaggaggatttatatgaaactgttagcgattacatcatgtccgaacggcattgcccatacgtatatggctgctgaaaatttacaaaaagcagccggcagattaggcgttgagatcaaagtggaaacccagggcggaatcggggtggaaaataggctgaccgaagaggaaatccgggaagcagacgcaatcattatcgcggcggaccgctcggtgaacaaagaccgattcgcgggaaaaaagctgctggctgtcggggttcaggaaggcatccgcaaaccggaagaattaattcaaaaagcgcttagcggtgaagtgccggtctatcaatctgtttcaaaagctgaatccgcaagtcagcagggcaaaaaacaaaacccgatttaccgtcatttaatgaacggcgtttcttttatggttcctttcattgtcgtcggcggattattgatagcggttgcattgacgcttggaggagaaaaaacaccaaaggggttagtcattccggacgagtctttttggaaaacgattgaacagatcggcagtgcttctttttcattcatgatcccgattttagccgggtacatcgcgttcagcatcgctgataagccgggtcttgtccccggaatgatcggcggatatattgcggcagccggcagcttttacgacagtgcaagcggcgcaggatttcttggaggaatcattgcgggatttttggcgggatatgcggcgcttggaattaaaaaatgtaaagttcctaaagcaattcagccgattatgccgattattattattccggtgtttgcctcactgatcgtcggtttggcgtttgtctttctgatcggcgcccccgtcgctcatattttcgcatcattaacggtttggcttgcgggaatgaaaggttcgagctcaattctcctggcattgattttaggagcgatgatctcctttgatatgggaggacccgtaaacaaggtggcctttcttttcggatcggcaatgatcggagaaggaaattatgaaattatgggcccgattgccgtttccatttgtataccgccgatagggcttgggattgcaacgtttttaggaaaaagaaaattcgccgccgcagaaagagaaatgggaaaagcatcatttacgatgggccttttcggtatcacggaaggagccattccatttgcggcccaagacccccttcgtgtgatcccgagtattatggcgggttctatgaccggctcggtgatagcgatgatcggccatgtgggggacagagtggcacacggcggccccatcgttgctgtacttggagcagtagatcatgtactgatgttttttatcgctgtaacagcaggctctcttgtcaccgctctgttggttaatgtactgaagaaagatatggcgaaatcccccgcgcccggcgaggtgctgccgtctgccgcaccaaatgaagctgcagcggcaaaagaaacaaaggaaccatctcaggctgacagccgaaaagccgggatgaccgaaatcaaaaaactgactgacattatcagtacggacttgattgaaccgcatttatccggcgaaacgagggatgacattatcgatgaaatgatcgagaaaatgtcccgtaaaggtatgctgctgtctgacagcggatttaagcaggccattttgagccgggaacagcagggaaccacggcgataggtatgaatatcgccattccgcacggaaagtctgaaaccgtcaaaacgccgggtgtcgcattcggaataaggcgttcgggtgttgactggaacagccttgatggttctgatgcaaaactgatttttatgattgccgtaccgaaggaaagcggcggaaatcagcatctgaaaatattgcagatgttatcccgaaaactgatggatgacagctatcgggaaaggctgctctccgttcagacaaaagaagaggcgtatgagcttctggaagaaatcgaataaagcgggggatgatcatgtctactgaaccgatatttttcaatccggttttcaaagaaaggatttggggaggcgccgccctgcgtgattttcactataatattccgtccgagcggacaggggagtgctgggccttcgccgctcatcaaaatggacagagcacagttcgaaacggcatgtataaaggatgtacgcttggtaaattgtgggaacatcacagagatttattcggaaaccttgaaggagatcgttttcctcttcttacaaaaattttggatgcggaccaagacctgtccgttcaggtgcatccgaatgatgactttgccaaaatgcatgaaaacggggaacttggaaaaaccgaatgctggtatatcattgattgtggaaaagatgcggagatcattttcggccacaacgcaacaacaaaagaagaactgatatccatgattgagcgcggagaatgggacgggctcctgaacagagttaaggtaaagccgggagatttcttctttgtcccaagcggcaccgttcacgcgattggaaagggcacacttattttagagacgcagcaaaattcagatacgacttacagattgtatgattacggaagaaaagatgcggacggcaggctgcgcgagctccatttggaaaaaagtatagaagtgacagacgttccatctgtccgtgaacggccgaccgttcaatataaacaaacagatgatctgctggcagctgttttaatagaatgtccttatttttcagtcgaaaaatgggatgtaaaaggtgaagtgaatttattccagaatcatcccttccttcttgtcagcgtgatcgaaggagacggaataatgattgcaggcgggcatgaacatccctttagaaaaggagatcatattctcctgccttccggtttgggagaatataaactggcgggccatgcaaattgtattgtgtctcatctgtgatcttcaaaacccttctctggcatcagagaagggtttctcgttacttttacaaaaaggccgaaatttccgtggttcgttcctgaatttattctctcaatttgtatatctcccgagccatcgattcaagtatgtacatcgcggggatttgggtggtgatattcgcattttcaacccattcttccgtcacgtaatatgaaatattcacatcggacattttggcaatggttgaatgtttatgatttgtaatactgatgacccggcttccttcttgtttcagctgattcagatgagtcaccgtagaatctccttcacctgaaaccgataatgcgatcgtgatgctgttatggcggaaatgggaatgggccggaaagtaaggatctttaatatacattgaaagtttccctaagcacgaaaaatatctggctccgtattcggcgagaattcctgaactacccactccgataaaaatgacgctttctgcatcggctgcaagggctgctgcttccttcagcttttcttccatccctccgcttactgttctttcaaaaaactcggcaacggaatgatggggactctttaaaatcgtttttttatttgcctccgcatacattttcagcttcaccttaaactctgaaaacccttcacagtttatttttttgcagaaacgtaaaatagaagccgtagatacatgggtttcatttgccaattcacggatgcgcatatagacgactttctcgctgttttgggagatgtagttgtataaagaagtttcaagctcgttaaatgaagcaatcatttcgtgtgtgaacatgcagggggattctcctttttatgagaatggtgaatgtacatctcatcgtaacatatcatttttaaaagaaacatagtgttattttcatgtgacatatcactttttgtgtcattcaaaacaagacgtcagccaatgatttacggtcaaaacaactgcggatataattcgttcatacgctttatgcatgatctcttcaagggccgctgacaaaagcggccgaaaaaaggaggacaatatgagtatcaaactgatagcggttgatatggacggaacgtttttgaatgatgaaatggcatataacgaagagcgttttatgaatcagtatcgtgaattaaaagcgcggggaattaaatttgccgtagcaagcggaaaccaatatgcgcagcttacatccttctttccggaaatcaaaagtgaaatcgctttcgttgccgagaatggcgctttcgtcgtgaatgccggagaagaagtattcgtgggtaacatgtctgaagacactataaaagaagtgatccgtgctttagagcagtatgaggtgaaaaacgtcattgtctgcggaaaaaaaagcgcgtatattcatgaaaatgccagtgaagatgaatatctgcatgccagtaagtattattatgtgttaaaaagggtgccgcattttgaaaacatcgatgatgacattttaaaattttccatcagctttcccgccgaacattgttccgcacttctgagccatttaaaaaacgcaatcgggtctttcgtcacgcctgtatcaagcgggcacggtgacatagatctgatcataccggggcttcataaagcaagcgggattaagcttctccagaaacaatgggggataaatgctgaagaatgcgcggccttcggagacagcggcaatgatttggagatggtgtccgccgtgaaatacggagtcgccatggataatgcgcaggaaagcattaaacaggccgcagcgcatatcacgcaatcaaacaatgaggaaggggtcttaaacgcgattgattccattctcaaatgtgaaaaaccttttgtctgaaaaagacattttaactgcggaggtgctgaacgatgattaaattagtgattacggatttagacggcacatttttaaataatcaaggcgattttgacagaacgttatttgaaaagacaaaaagagtaatggaggaacagcatgtcgctttcgccatctgcaccgggaaacagtgtgaaagggtggaagccttattcggagaagacgcgaaagatttttggattttaggagacagtgctgcacgtatgaaaaagaacggcaagttcgtatatgaatctttaatcagcaataaagccggactgtcaattataggcgctttagaaaaaatcagctgcgggcacaccattatcgcgtgcacaaaaaaaggcgcgatcgtaaaagaaaatctgtctgaaagtgaaatgaaatatgtaaatgcctcttatgcacatgtaacgaaaataactgattttactgagataaaagacgattttatcaagattacggttcatgcccccgacgccaactgtccggaaacgagagaaaagctgcatgaattttttcaccaattatatatcgtagcatcagaagatacctggatggatatatcaaatatcggaatacataaaggatcaacagtacaagaactgcagcgattattaggggtttcggcagatgaaacaatggcattcggagacggccgcaatgacaaagaattgatggaagcggcatcctacagctttgcggttaagaacgccattgacgaaataaaagatgcggcgcactttgtcatcaaatcaaatgacgaaagcaccgtcatgcacacgattatgagaatattagcgctgcaaaaacaatgatgggctaaaatcaatgcggcatgacttactagggatagaaaaagcgggctatcctcagactttaattcacttctggtttttctaaaatatgttaaaaatgaataaatatctatatttgactcgatggtattggtataatatgtataaaatgaatgaagcggtgtaatatcaagatgaaaaaaatcacttcatatcagacaaaaagtcggaactgcctcgttttgaaattgggaggtgtttgtattagcccgctgttgagccccgcgtatatcattcttatttttcttccggcagcttcttttctgttagggattttaggatatttcatctttaaaaaagtatggatgatggttgttattgtcttcattttgtccttgatattcatgtttattgtaataggcgccgaaccgacatttttcatttgggtggctatgatgacggggagctgttttgtctccggttcaatcactaagacgatatggactttcgcaaagaaaaaatattagacagaagaaccctgtttgaacagctatcctttttttgtcgattgaagaaaaagaagtatagagttatccgttatgttcttatatttttgtctgttgttgtcagatcgggctttctgttgaaaatgtctgtctatcattttgttcttttttaactaaacggagcactataattgaactgtagatacatagaaaaataaaaaaggataaggaggatttttatgtttcaaaccttagaccattttttgaaatcttgggaattcgaagccgatgcgacacaaaaactgctgaatcatctgactgatgaatcacttaaacaagaaatcacttcagaacattggactttaggccgtattgcttggcatactgtcgcggcgattcacatcattacctcaaacacagatttaacgtttcatgctcctgctgaagattatcctgttcctgcgtcggcgcggtttattgctgagagttatcatcaagccagtaatgcatttgtacaggcgttaaaaacgcaatggactgacgatacacttcaagaatgtgtcaactttattggtcagcaattgccaaatggttcacttttgatgtttttaattcaacatcaaaaccatcatcgaggacaaatgactgtccttatgagacaagcaggtttacctgttccgggtatttacggtccggcaaaagaggaatggattaaattcggtttggaagctccgaaataggatattgttgtaagggctcgaatgaatagatgataccaatcgatgttggtatcttttttgttttagtcttagagtgattaaaccggtatccatgacatgcagacgaatcaacagttcaatagatgtaaattaaggtcaataaatgcagaaaggtgattatgatgataactaaaatgacgcgattcaatatgaaagacttcaataaaccaaacgaacctttcgtagtttcagggagaatcatcccttcatttgaggacaatgtttggacatatacagaggagaaatttgctgagccttatgtcaaaaaatatgacgatgaagacattgatgtcagttatattgaagaagaggataaagttgtctttttttattacgcagagaacgactgtgtcggccggagtaagcttcgttctaattggaatggatacgcactgattgaagacattgccgttgcggaagattatagaaaaaatggtgtcgggacggctttattgcataaagcgattgagtgggcaaaggagaatcatttatgcggtcttatgcttgaaacacaagatattaatgtttcagcttgtcatttttatgccaaaaataactttgtcataggagcggtcgatacaatgctttattccaatttttcaacagcaaatgaaattgcggttttttggtactgtaaattttaaatataatagtatttgatgtttcgtcatttagcgggtgtgtgtcgcgaagtattcaaaacatctgcttgaggatttataataaggtatatcaatcaatgcagggggagttatggatgaagtgcaaaaaaatgaacagggtacaattaaaagagggaagcgtatcaatggccctataaactgcgtctgccctcattaatggagggaaagttgtgaatacgccttattcacagtcagctttacggcacaaccaagtgttcatttggctttgtgttctgtcatttttcagcgtattaaatgaaatggttttgaacgtctcgttacctgatatcgccaacgattttcataaactgccagcgagtgcaaactgggtgaacacggcctttatgttaactttttccatcggaactgctctgtatgggaagttatcagatcagctgggcatcaaaaagctgctcctatttggaattatggtaaatggcttcggatcgatcattggatttgtcggacactctttctttcctgtacttattctggcccgatttattcaaggggctggtgcagccgcattcccggctcttgtgatggttgcagtagtacgctatattccgaaagaaaacaggggtaaagcatttggtctgatcgggtcgctggtggcaatgggggaaggtgccggaccagctattggcggaatgatcgctcattatattcattggtcatatttgctgcttattccaacagcaacagttatcaccgttccattcttgatgaaactgctggaaaaggaagaaagaatcagcgggcgctttgatatggcgggaattatattaatatctgcaggcatcgtatttattctgctgtttacaacgtcatatagactatcttttctgatcatcagtattctagctttcctgatatttgtgaaacatattaggaaaactcaagatccctttgttgaccctgcactggggaaaaatgtcttgtttatgatgggcgtcctttgcggaggcctgatattcggcactgctgcaggatttgtgtctatggttccttatatgatgaaagatgttcaccatttaagtactgcggcaattggaagcgggattatgtttcccggaacgatgagcgtcatcatcttcggttacattggaggatggcttgttgatcggaaaggttctttatatgtgctgaccattgggattgcattgatgtctttcagctttttaatcgctgccttttttatagatgcgacaccatggctcatgaccgttatcatcgtttttgtttttggggggctctccttcacaaaaacggttatatctacaattgtgtctggcagtttgaaacaaaaggaagccggcgccggaatgagtctgcttaattttacgagctttttatcagagggaacgggtatttcgattgcaggcggtttattatcgacccgcttgctggatcaaaggctgctgcctgttaacgctgatcattccgcttatttgtacagtaatatgctcattctttttgcaggaatcatcgttatgagctggctgttaaccatgaatgtctataaacgttcgcaaagaaatgactaaaaagggaaaaggatcaaacttgataaaagttttgatcctttttttgaggagcttccttattccgaaaccttttgtcgatcaatgaaaggggagttaaagtgaattacatttataagaaaaaggaaaagaaaaatggaaattgtatcatttcaatcagagataaatgggagaatgcacttattgagtttgaacaaaaaaataatcaaattgagatcatgatcaattatcgtaacgagaaaacaaccaagttttcactgccaatcgagacttttgagaaagtgtatgaggatattaaaataggccggggagaaagttaatcattctttttgaaaatgaccatgatgttcgtaagcagtatggttttaacacgcatttggatttccctggcaaaataaaggtttttgggaatttatgttaaaataatagtaagaaccttgggcagcggacagggagtttcgttgcttcataaggagagggaactatgaataatattcacatactgggagcctccggagtcggaacttcaacactgggtgttgcattatcaaagcatttgcctcatacgcatcttgataccgatgattactattggacagataaattcactaagaaaagagaaattcctgaaagaagaaagttgcttgaaaaagacttgacaataaatgagaaatggattctttctggcgcagtgtgcggctggggcgatgatctaaaaagttattttgaccttgtcatcttcttatggattccgcaagatatacggcttgagagattaaggcatagggaatttcagcgttatggaaacgaagtgttagccggcggcagtaaatatgaacaatcaaaaacatttttagagtgggcttctttatatgataaggccggaatggaagttcgaagcaaagctttacacgaacattggatggcggatttatcttgtccattgctgaaaattgaaggagattactcagtcaatgaaagagttgatcgtgtcttggattatctgaattctaattaaactaacggatggagataactgaaaaaccaaaattcaaagacagttccggccattttaacggagctgtttttttataccgctttcagtttctctgttgtgaagtgatttattttcggcagcatcccacaatagagaagtgatttgttcttcattaagttctccgttggagtatttctctaaaattcgtataaatcgttcatcacctaatcaattatttctttgtttatttttattctccatctcattttcagaccgaattaaagccctctcataacgagaagggctttccacaatatatttttagaattttttcgatccaaacaaatatctataaaaaagataccggcaactttctgcggcatctcgcagtgttcaattgtttagtgctttttttcataatctttacaaatctgaaaaagtcatcatccggcaggggcttgtcatcttcgcgtccattgcgatgcatatgcggatcagagtgatgttcattgtagaactctacgatatggaatccgcacttattcacatagaagttgatatttcgcttttcgaaataaggtgtcacggtttcccaaagcacagtatccggatactgtgcttctatggctttccaagcagaaagaccaatcccctggctgtgatgttctggagatacatagaataaatctagcgaattatgatgtctttcgctgttgatacgtactactgcaccacctaccttcttaccatcccgaagaatatgataaacgactgctccgggagcgtcgaaagattcctgaacatcattgtccgatggaatcggtccatcttcgcaatcaccgaacgtttcaatcacggcgatcgcaaaggcttcttgtaatttttttttgaattctggcagatcagattcctttgctggttccagaataacttttggttccttttttgtcttcatgattgctcactccttcagttgctgaaataacgagttcagtcgttcagtaaaacattccagctgctctgccgctttttcttccgcggtaaatttggcgttaaaatacttcaaaagctttctcctgtctttttgtatgatgtctttttctttgttttcttaaaaaacaagctgcatgtccttatttactatcgttcactgccgtattaagtgtggtacgcgggatttgccatcattctcaaacttttcctgcgaaaagttgcaaaaatagtcgaatgtggcgcctttgcctatgaacatgcgtaaaagattcaaagattcgatcatgagcaatgcacattgagtaaactccggtgaatttattagcccaaagaagcctaaatgatataaaaataactagtatatatatcaaatctgtccgtttaatgcccacttctcaacatgaagtcatgcaatctgtgcaaaggggttatttcggaattgatttttccgaatgcatcggagtcgctttgggacttccgtttactttgccgtacgtcagcttgcgccatatcaattccatcggaccgtacttaaaccgtttcaaccacaatgtactaaagctcataagcacgaagtacacggccagactgaacatgaacgtgccggcggattgaatatgatccgcaagcccgaatccgtaccggaggaacagaactgttccaatgatagagtgaagcagataacaggtcaatgacatccgtccgactttggtgaatatcatcatagggcctcgcagctgaggaacgtacagaaacagcattgcaaaagtgctcatataaaacatacttccggttaagccgccattttgacccaagacagaggaaatgtccttccacagcatattctcagaaagattagacatgtctagtaatatacttctttgtgttattagaaaagcgattgtgctaatgatccagatacgcttccatatgaactttttcgcttccatgtctttgaaaaattccatcttaacaaagtacacgcccagcaaaaacatgagaaacatggaatagatcatagagaaagagctagcagccatcgtgaccatatctgtccaccgggtgctgatggattccatgtaggtaaggcttgtgtggctaaacaaagtaaactctgaaaaattcgggttttttgaccctgcagtattgatgacattgtacaacattgtgaaaacgggaatcaggaattgaaacacgataagtgcgataatccatctaagaaccgttttggccgtgcgtttatagaaagcgagtaacaggaagccgcttacggcgtaaaaggtcaatatgtcaccgacccaaacaaatgtgatgtgcaaaatgccaaaccccaacaggatagataacctgcgggcaaacagcttgttgggactatctaccttctgtgcggctcgatccataaagatcataaacccaactccgaacaagaaggagaataatgtaacgaatttcccttcggcaaaccaggaaaccagattgtgcaggaggtcaccggaggccatttcgaatccctttactgaatctacgatcagaaaatagttgacaataataatgccaagcaaggcaaatccacgtacgatatccagaaaatgaacccgttcccgcagactcactggttgcccgcgttcttctttttgtacaatcatatcaatactcctttcccatttaccattgcaatgtgcagtgcggatctgaaaaactcgagccttacaatggataaatataaagacagaatcttaacaatttatgaaggttcatcattttttttaaaatgtgacaaaattgtggcggacatcagctttcataaactgttaagatttacgtagtatcttataacgtacgttacttatgaatgatatatagtaaggtgacagaaataacatcaagaatcatgaggtgaaagaggcatgacccatcgaatattagtcgtagaggatgatcatgatattggtgatcttttggaggaatcccttatgcgagcaggctacgaggtgctaagagccaaggatggaaagcgagcattgcaacttgtgaatgattcgctcgatttggttattttggatattatgatgccaggcatttctggaatcgaaacctgtcagcacatcagggaaacctctaacgtcccaattctgtttctgacggccagatcgagtacactcgataaaactgagggattactcgccggcggcgatgattatatgactaaacccttctcggaagaggaacttcacgctagagtgattgcccaattacgcagatatacaatctatcaggaaaagaaggaacaggaagaaacatttcttatcgggggcaaactgagagtgagcgaagaatttaatgaggtttggaaagaggagcagcaaatcaagctgtcagatctggaatatcgtatcctgaaactgctgatgagcaaacgcaacaaaatattttctgctcaaaatatatatgagagtgtgtggggacagccttacttttactgttctaacaatacggtgatggtgcatattcggaaactgcgctccaaaattgaggatgatccggcacgtccggtttatataaaaactgaatggggaagaggatatcgatttggcacatcgtaaattcacgctaaccaaaaaactggctttgctgatcatggttgctgcgattgtgagcggtgtaatctttctgacgttgcaaaagattacagatgatctgatcgagggatatctgagttcggatgagtattatcacaaggagtcagcgagatacattcaaaaattcagtcagtacgtttcagaaaatgggttgtctacatcggatagaaaagcgtttggcgagtgggtcaaaaaagaaaattacattaacctcaccatatttaaggatcaggagctgcaatatgattccgtttattccgaatcggattatggaaaggaaaagctgactcagtacgctcaaaatcattcacatcctgtcaagttcagcgatggtgaaggacgagtcattatcgacggtttctactcttcccgatattatgatctggcctttacattggatttgctcggtgcaaccctcatctttttaatcattgttctcttgggcattcgccaaagtcttcgctaccttaaaacgcttcaccaagagattcatattcttgaagggggccagctggactacgagatgacgataaaagggcatgatgaattagcgatgattgcaaagagcattgaggatctgcggaaagctttcttggacaaacttaaagcgatcgaggaattgcaagcagagagccgcagcctggttaccgaaatgtcgcacgatatgcgcacaccgctgacgtcgctgatcatgaatctggagtttgccaaaaaagaaggaggcgaagcgggtacaagcaaagatcgttatgtagccaatgcttatggtaaagcactgcaattaaaaaacttgtctgacaatctgtttgcgtatttcctgctgaataaggaacatggggccgacctggagaccgttgcagtgaaagaagtgatctacgatctaatatcagatcagattgctatccttcatcaggagcatttccgggtccatatttcaggcgagctgccggaaacctatattaacgtgaatttggaggagcttggtcgtgtatttgataatgtgatgtcaaacttatttaaatacgcagatccggaagaagaaatcagcatcacgtttgtatcggatcaagaaatatttgagattcatattagcaatacgattaaacttgcggatgtaacaccggaaagcaacggactcggtgaaagaagcattgcgcgaatgatgtcccgcatgcaggggcagtttcacagtatacaaaagaattccaagtactgcatcgtgctgcgattttggaacagaaagatgtaggctgcgaatcaaaacgacgaaaatattgaaataggagacaacaagatgagattttccaacaatttcaaaaaggcaccttacctgttacaagcgcttctcaatgtctgcctgttcttcctggccatagccttaagcggacttctgatcagcgagacatggtacattgtgcaattcgtatacaagtcactgttcaacaaagtggacagctattatgagatgcttggggaactgcttatattcttcatgtactttgagttcattgctttgattatcaaatacttcaaatcagactttcatttcccgcttcgctactttatttatattggcatcacggctgtcattcgtttgataatcatcgatcatgatcaggcgatctcaacgttctggtgggcgatggccattcttgcaatgatttgtgcattctttattgtcaatagacgaaattctgttgttgaacattaataaattagttcactttataccgatacgccactgaaatgtcctatgacttacttgaatactaaataggtgtaaaaagtggttattcatacggattgaaaaagaagaacacgcagcagactcacttgctcttgtttggggcaagtgttgacaaccccattactggtttaattaaaagaaggggtataaaacctgtatcaatggtgttactcgatatctgcgacaggttttatatgcaggtaactaatattcctatatatgtaacattgcattttttatgatgcaatagttcactctatttctgctttcaatttttcgaaccactctaaattaaccaagtgatgtgaacgggaattttcattcatacggcgaaagtaattgattgtgccgggaatttcttgagtgatggacaggtattcgtcaaggagctcgattcgagttttagtctgatcgatttgtgattggatcagatccagtaatttatttttgtcgaattcatcggcaaagagtaacgccccataaaattgcaggttcacatattccgatttggtgccgtatttgatcattaatttttcgaattctgcccttcccgaatctgtgactttaaagttacggatttcacgcccgccggttgagggtttctgctgaatctgttcaatcaaacacttttcttcaagttgctgcagattgtaataaaatgaacctttcgtgaagttaacgatgtacttgtaatgacgtttttccattaaggccagaagttcatagccgtgagctccggggttttggatgagcaagccaaggataagtaagggaatcatggtttcatcaccttcgccatccgcgcttcaaattccgcgtacgtgattttacccgaagccaaatccatactatgaaggtaaatctgttctgttttagaatagtcaccattcactttcagtgattgctcctctcccgaaatgggtttcaggatatgatgctttttcgaaaaagcctcgaagtagcggtaaccgaatttgcgttgtgaagctgcgtctaaatgaatgccatcaggattcgcagtcaaacctgttgcagtaacaaaataacaattctgttgttcattagcaaaacgcagcaattgttcattaacctgtcgaaattcagtcgcgtgctgtccaaaaccagtcttcccaagaaagtcaccaagccctccaataatcaacggtacctcatcaagttccaactcgtttcttagcgtcccgatgataagagttaatttctcgtaataagtttcatgcagcgaacgataactgtcactctcaccttggtgccaaaggattccgcaaatttgactggatcggagggcgaagcgggtttcggacaaagcatgctgaaaaaggatgccttccggatgccagtcattcaatgaactgccaccttccgcacacgggatcaagccaatttcttcatcgggatgagctttcgaccatgcatctgcaaaagatgccgccaggccaacgccggaaaccggacggtcgtaattaatcggctctgtcatcatctgccactgtccattgcgcagcatttttattttttcattatagatagggtctacttcattcaaaaatccacggcccgccatattcgactgccccaacattaaaaaagactttatcatctaatttttcacttctttacatcaatattttagtctaattagactatagtcaattcagcttgtcttgtaaagtttcaactaggttttattagtatgtatgaaaagcgttcctgtggcagctacactcgacctgcctatacataaaaacttagggttatgcctggataggctcaattccagcttgggtacaaagggtacatacagcctgctttgcgaacaggccaatataagtctatcaattgcataccgattcatgaaggcgaattgcagaagtggaatccgctgattgaggagacgagatcgattttgaaaagcgtgaattcagacgtagtgattggttatgcagcttattttgagttgataaatggcttccgaaaaacagtgtactggacaaaggtacaagtagaaaagcacaaaaagaaattcagtaagtctgatgttggatggaaaaatgactgggatgcgatggcaactaagttttcgagccttcaaacaaagaaaatacagaaaaccaagcgtgcgagaagccgatccttttgacggcaagcctgttcaagcttcaacttttattcgaatggttcaagacatgccaacgattttaagagttgcgctgactaaggatcaaaagtctgttccatcaattagtacagttaacttaagcacaaaagaagtaattgctgaagttaacattacctatgacacacttgaaaacaacatcgaacaagaagtcgcatctgtatgcgacttctatcattttctaattaatagaaagtaaccataagaaaaaatttaaggacttgcagccctatggccgtataaacaaatttaatccctcataatatgtcatcaaacttagcaatatggattctaatttaggagtttaagagcgattgatgtgttcataaatgtctttcacatctaccggacagtgggtgagtaaaatacgtcactatgcatatgctgtattttttcccagttggcgggattggttgtatcaaaagagcggtgctccataatggcctgatatagggcggttttttgttccaaatgggcaatgtgctgtttggcttcttcgagctgggcgagcgcatcttctttatgctccatcatgagtgtgtaccgttgtggaatggtcgaatctccttcaagacagagattcacgtacgttttaatgacttcaatcggcataccggattgcctgaggcatttgacgccaaacagccagttgattgattcttcatcgaacaaacggatattgtttttattgcgctgtacgctcggcaccaggcctttatccgtgtaaaagcgcaccgcatgctcagtgagtccggttatcatcgctgcttctttgactgtatgcatgggtaatcctcctttaaaaattttttaaaaaagtgcttgccttcgtgttacacgaagataataagcttattataacgcaaaccagccgcagcggaattcattctgcagtgcccgattttcgggatgcgtgccgtttgtcgttctacatttgaacaataggaggaattacaatgcaaaccgtaacattaaacaatggagtgaaaatgccaattatcggcttcggtgtataccaagtccccgatgctcaagaatgtgaaaacgcagtatatgaagcactgatggccggttatcgcctgattgacactgcttccggttacctaaatgaggaggcagtcggacgtgcaatcaagcggagcggcgtatcgcgtgaggagctgttcattacgaccaagctctggattcaggatgccggctatgaaagagccaaggcggcattttccaaatctttaaataagctgcagctggattatcttgatttataccttattcatcagccatacggcgattactacggcgcttggcgcgcgatggaggatctgtaccgcgaaggaaaaatcagggcaatcggagtcagtaacttccatcccgaccgtctaatggatctgatcatgcataatgaaatcgtgccagccgtcaatcaagtcgaaacgcatccattctgccagcaaaaagaaagtgctgcttttatgaaagagcagggagttcaacacgagtcatgggcaccgttcgctgaaggacgcaataacatgttcagcaacgacgtgttgtcttccattgcggaaaaacacaataaatccgtcgcccaggtcgtgctgcgttggcttgttcagcgtgaagtcgttacgattccaaaatcggtgcgcaaagaacggattgtcgaaaactttgacatttttgattttgagttaagtttagaggatattgaaaaaatttccacgcttgataaaggagaaagtcttttcgggtcgcaccaagatccggaaattgtaaaatcgataggcgccatgaaattcgatctgtaagctttgtctaataaaacagttaagtttaatgaacttaaaaggttaatcccatggattacacagaggatatcgatactacaacttagggattagaaccttatcgggtatgaatattattcgaaaatttccaagtttgttcataaggaagggttaatgctaaaaagactgcgtgcaacttacattttaacggaagaacaatttgatgagatggttaaaccagaaaatctgaaacctaatatttgaatcttttaagataaaaactagttactaatcagtaactagtttttctttcagccagatcgagatctgcataaagaaagcagggactgaagtatgcctgtgaaggattttctgaggagctttttagagcgtccggcgttgaatcgtttgagagaggacgcaagttaaggacttataagtcaagtcatttgataccaaaatgcagtaacgaatgagaaaaatgattttcataactgtcacatctctttttctatattctgactttattgaatctgagtcaccggtggatattatgccggctgaagtgatttccgtttcatctattgaaataaggcttaatgaaaatgacaaattaataatacctgctgatttgattattattcctaaacggttgcgctctggagaaggtgaagaactgaaaatgggtgagaatttgatggttgtctccttaaaaggcgggcaatcattttttattctcgataaaatttaatgataataatcctgaaaaaataaataattgtaaagaaataatctatcctatagaataactataatattttgaaaatttcatccgaggtgggttatgaaaactattggtcttattggcggaatgagttgggaatcttcagctgagtattatcgaattatcaatgaagaaataaaaaagaagttaggagggcttcactcggcaaaatgccttttatacagtgttgattttaaggaaattgaacattatcaatccataggagcttgggataaagcaggtgaagctttaggtcaagttgcaagatcattagaaaaagcaggtgcagattttattgtaatatgtacaaatactatgcataaagttcttggatatatccaagaaatgatcactatacctattttgcatattgccgatgcaactgcagaacaaattattagacaagacattcgctcagtaggattgctaggtactaaatatacgatggaacaagatttttataaatcacgtattgcgtctcatgatattaatgtcattgttcctgatgatgatgaaagggaattaataaataatattatttatcaagaactgtgtctgggtgaaattaaacagtcttccaaaaacatttataagaagatcataaataatttggtggatagaggagcagaaggaatcattcttggatgcactgaaattggactattagtaaaggcagaggattcaaaagtgccattatttgatacgactttaatccatgctcaaaaagcagtaaataaatccctttcgatttcttcttagaatgattatttcttatattttaaaaccgctctttaggagcggtttttattatggttcattcaatcaataaatggaggaacgttataggagtgatcttatcatgaccctttcctcagaaattgaatttgatgatattgaagatgacagcgaagtcatagggacctctcaaacctacaaaatagattttgaaaatggccgtatcacaaatgaattcatcacaggccttgacgcgattaaacagtttgtatatttgtcccttcacactgagcgctacgcatattctgtttatagtcatgattgaaaaagataaaatagaaaaagccggaatgtcagatccggctttttgctcactttcccttcttcttccgcttctccttttccgcccggtaaaactcatgaaacatcttcatcaatgcgcgtttttcaatccgcgacacataactccttgaaatgccgagctcctttgcgatctcgcgctgcgttttttctttttttaaatcaaggccgaagcggccgacgatgacttctttttcgcggtcgtctaaaatatcgatatattttttgaccttttcaagttccatgttgagctgaatggtgtcgatcacatcttcgctttccgacttgagaacatcaatcaggcttatttcattcccttctttatcctggccgatcgggtcatgaagggagacgtcttttttcgtttttttcaatgcgcgcagatgcattaaaatctcattctcaatacatcgtgcggcatatgtggcaagcttcgttccttttccggctgagtagctttcaattcctttgatcagcccgattgtaccgatggagatcagatcttctgcgtcttctcccgtgttttcgaatttttttacaatatgggcgactaaacggagattatgttcgatcagcatattgcgggcgtgttcatctccttcggccataaggtctaagtattttttctcctcattatttgagagcggttgtggaaaggcattatttttcacgtatgatactaaaaacacgagttctttcacaataaacccgagcgctgcaaaaacacctgtcaccatcctcacctccacaaagttatgtaggcaaaagcctatatgtaactgtatgtggcagtcaggctgtttgtgtctgtacagggaaattaatcaaaggcaggttttatttcttacagcctcttgattttttctgattgagcctgtatattgttaaaaaaagtaagggtgaaaagaatataacgaaaagcgctgaagagacgagtagacagatatcattcatgacagagagctccgggagctgtgaaggagtatgaatggatgtgttgaaacaaacctcttagcttcgcatcggaatcatgaaaaacaaggatgatgcggcggatactcctgttaccgagtaagctttgtacccggcttaggccggcaccaaaccgaattgaggtggcatagcgggctgtttcccgtcctcaagactttattgtcttgagggcgttttttatttctaagggagggataagatgaaaaacctgaagtcttggctgtacccgatgcttctgttaaccggaatcgggatagcaaatattggtgaatggatttattttttgtctcttaatcttattgtcttaaaagaaacggggtctgcttttgcggtttccatcctttatttaatcagacctgcggctgttttgatgacaaatgggtgggcgggcagcatcatcgaccggtgtaacaaacggaatatgatgatgtcgcttgatttcatccgggctgcattcattgccgttctgccgctgatgtttactgcacggtctttattttccgtttattgtatcgtgtttttgattcaaatggccaatgcgatgtttcgtccgtgttccatggcatacgtgacgatgcttatcccggctgaaaggagaaaacgattcaattcactaagggctttgtcggaatcaggggcttttctcctcgggccggctgcggccgggctgctttttatcgccggcacgccgatttttgcgatttgggtgaatgcgggggctttagtgctgtccggtttcatcacgatgatgctgccgagccttgaaaatgagcctcacgtacattctcccagacagaagctttctttggcagtgtgcaaagaagattggaagctcgtctatcgcttcagccgaacggcgcgaaacgtcatgatcatttattttttattcagtctggtcatgaccgttatgccatccgcgcttgattcgcttgaagccgctttttcaaaagaagttcttcagctgactgatgccgattacggttttctcgtcagtgtctcaggggcaggcattattgcgggggcgcttgtcaatgtattctttaataaaaaaatgccggcttctttattgatgggaatgggctctttattcacagcgtttggatatataatttatgcgttttctgacgttttttggacggctgctttcggatttttccttctcgctttttttctggcgtttgccaatacgggatttcagacgttttatcaaaaaaatgttccggtggacattatggggagagtggggagcttttattcattagtcgaagccgtcttcattatattgataacggcggttttcggagcggcggctgtcagttcttccgtccgcggcatcgtcatcgcaggggctgctgttatgctggcgttggcagccgttttatgctcgttcttattagcggccgcaaaaaggaggactcccgatgtatttcaagcggatcaatgtaaacaaacataaagagacggccgtttcatttcgtgaggatgagtatctcaggtggctgtcatcccaaatctaatgctcacccgacaattttaagctgcttcttcataacgggcagccgatcggacagcttgaagcttccatcaaattttaccgcagccaaaaaatcggttatgtgcacctttactatatgactgagcagcagaggggaagagggagcggaacaaaactgcatcaatacgcgaatcagtttttcagagcgaacggtgtttcggaatatcacctgagactttcgccgggcaatgaagcggctctgtcattttacagaaagaaaaacatggaagtgatcggttcagaatgtaacggaaaagttctcagaatgagaggagccgtaccgccggaatagggggcggtacgcgtttcattttctcgttgtttttaaaagaccgggaaacttcttataaatgaccgccattaagacgagcatatacattccgtaaatcccgaaagacagcagtttgttgcttgtaaatgaagcgcctgcgacggtcacgatcacaatgttcggaattttgccgagcaccgacgcagaaaaaaagatcggccatcgtatgttactcagcccgcagacggtattcatggcaagcgacggtataatcggaatcagccgcccgaaaagcaccgccgtaaacgcgtgctgatgaaatgaatcttcatattgggccgctgccgggtaagccagcagcttttttctggcccagtctctgaatccgtaccggacgagaaaaaacaatgccattgttccgagcatcgcgcctgacaatgtaatccacaccccgtttacaatcccgaaaaccgctccgtttaaggccgcgataatggcgaatggaacaatcggaaaaaatacgtcagctgcgaccagaaggatactcataagcacggcgtacatgccgcccgcgcgaatcatgctgagccagacgtctttttgcataaagccgatcatcacgacagcaatgatgacggcaagactgaatcccttttttatcatctgcacgttcacctcttgtcaattagtatacagcacaaatctatctccttctattaaaataagctgtccgataagcgtatttgatttatcagcatttgccgtttgatgagaaacggctggcacccgggtttggacaaaaacaagcgggaagcgggtgatgtgcatcatttgatgcagagaatgatttttataaaaggggacacgttaacagtagtgtttactggaggtgtaaacgttgagatgctttcatctgatcatcatgatatgcgtcctcacgagtctcactgccgtgtccgccgatgcgaaatctttaaaaagaagtgacatggagaagacgggaaacgtgtactgggatataaggtctgaaaaaaagaaactatctttaaccttcgatgacggcccccatcctgtctatacggaggctgtgttagacgtgctgaaacagcacaatgttaaagcaacctttttttgtgtcgggagccgtatagacaaataccccataacggcaaaacgcatcgttgaagaagggcatgaaatcggcaaccatacgatgaaccatgtttattttcaccgactgaaacgcaaagacattttacaagagcttcacagctccgcgcatcatatcacatcgcttcagccggaaggggacaagttattccgcccgccgggagggtcgctgaatcgtacggctttcaaaagcatcttaaaagagggctatcatatcatcatgtggtcatggaaccaagacccgagagactggaaaaggcccgggaaaggaaaaatcgtcaggcacgttgtttcacatgccagagatggagatatcgttcttctgcatgacggcggaggaaaccggcgccagacggttgaggctttgaaagaaatcattcccaagctgaaaaagcagggctacacgtttgttaaggtttcggatttgatcggacaggattccggtccttttcatatccagtaaagagagcgccgcgttgaaagccgccaaagagatgtgtaccataggaggtaaggtttggggggagagaaaatgaagtttgctgttctttttattacgataatctgtctgttatcaggatgcgctgcgggcaaagaaaaaagtgttgtcgcgttcggcgacagcaatacgcgcggttccaactgggattatcgtgattatccgaaggcgcagcagtgggtaaacattttaaaaacagcggaacgcggccgtcttacggttataaatgcgggaataggcggccagacgactgaggatgcgcgcctgcgctttcaaagcgacgtgctggaccgtaagccccaatatttatttatcatgttcggaacaaatgatgcgggcattttgacgggcgatcagccgcgggtatcaaagaaacggtttaaagaaaacctgacttatttcataaacgaaagcagaaatcacggcataaagccgattttaatgacgtgcatcccggttatagaaggaaacggaacgcatcatctctattactattcgagatataaagcctcagcctttaaagaaaaaggcggcgcgagaaaatggcataattcctataacggcgttacgaggcaggttgcagctgagttgaaagtgccgctggtggataactggaaacactttatacgcgcggacggcggcaaagatacagaccgggcgctgatccaatccggactgatagatccctccggaaatcatatgacgccaaaaggcgccagaatcttaattgaaggcataaaaaatgggcgggttttggaacgctgacgccgtcagctgcctaaaccgttttgcttctgcttcataggctgtagaaaaacatctctttggaggcgattgctatgaaccgcggtttccctccgcaatatcctgtatgcccgcctcctcgggtgaatgcggggtactggtacgcattttttgttgtgctgctcgtcgtcattctcgtcctgggcggtctgtattggttcaatatatagcagccgtcctcttaaacacctctattttaggggtgttttttgttgaaagtggtagtaatgcgcataaccgaagtgatataatatcagtcatctgagtaaaaaaaggaaattcgcccgggaatttttttctgtttaagaagaaacggaaataatgtgtccgagcgatcttcttttgatttcgttttcaattaactcgataaattcacggctcaaattcatttcattggctttgaaataagattctattagtaattcatcagaaagctttctcatgccggggacccaattaatgggagtggcacctccttacaattgtaatcaatcatcagacgcaagcatatgatggaaggttgcgtttcaatcatggtgaggttatctttaatctaccatgaaatacaaataagaacaatcgttctgttatccacactcgtaagtggataacttgttagtatcttgtttataatctggataaatccggatgtaataagagtggataatgtgtgtaattttatccacaactggtgaagaaacccaatttttgtcgaaatttttttactgagtccgactttgtttttaaatctgacaggtttcgacatatagatgatagaaagaaaaggaagggtgcgggttttgttaaaaaagttttttttacctgacgaatttgtgaaaaatatatttcatatcacaccggaaaagctcaaagaacgcaatgtgaaagggattattacagaccttgacaacacgcttgtggagtgggacagaccgagtgcgacacctcgattaatcgagtggtttgaagaaatgaaggagcacggcattaaagtcacgatcgtctccaataataatgaacgaagagtgaaattattctcggagccgcttggcataccgtttatttataaggcaagaaaaccgatggggcgcgcctttaaaagagccgtcagcagcatggatctgaaaaaagaagactgtgtggtcatcggcgatcagctgcttactgatgttctcggcggaaacagaaacgggtatcatacgatcctcgtcgtgcctgtcgcttcctctgacggagtcatgacgcgctttaaccgccggattgaacggagaatattgagttctttgaaacgtaaaggccatattcagtgggaggattagaaatggaaaaggttgtttgcatcggctgcggagtaacgatccagaccgaggataaacaaggtctcggatacgcgccaaaggcatcgctcacgaaagagaatgtcatctgccagcgctgcttcagactgaaaaattacaatgaaattcaagatgtttcattaacggatgatgactttttaaatatcttgcacacaatcggcgatactgactctctaattgtcaaagtcgttgatatttttgattttaacggaagctggataaacgggctgaaccgctttgtcggcggtaatccgatcattcttgtcggtaataaggccgatatcctgccgaaatccgtaaaacgggaacggctcgttcaatggatgaaacgcgaagcgaaagaatacggcttaaaaccccttgatgtctttttaatcagcgcttcccgcggacaagggatgaaagaagtcattgacgccattgaacattaccgcgaagggcgcgatgtgtatgtggtgggctgtaccaatgtcggcaaatccacatttatcaaccggattattaaagaggtctcaggggaagagaatattattaccacctctcaatttccgggcacgacacttgacgcgattgaaatcccgctcgatgacggatctgcgctttatgatacgccgggaatcattaaccatcaccagatggcgcattacgtggacaagcgtgacttaaaggtgctgacaccgaaaaaagaactgaagccgcgcacttttcagctgaatgaaaaacaaacgctttatttcggcgggcttgcccggtttgactatgtatcaggcgataaaacggcgtttgtctgctatatgccgaatgaattgatgattcacagaacaaagcttgaaaatgctgatgccttatacgaaaagcatgcgggagaactgcttaccccgcccggaaaagatcatttggatgaatttccggagcttacaccccatacgttttcgattaaagaaggaaagacggatatcgttttttccggtctcggctgggtcacggtgcagcaagcagataaaaaaataacggcatacgctccgaaaggcgtacacgtatttgtccgccgttcattaatatagagagaaggggagagggagcatgaaacaattgtacggagtaatcggaaatccgatcggacattcaatgtcacccgatattcataacgcggctttgcaagataagaacatcaacgggcagtattttgcgtttcaggtggaacctcatcatctcaaggacgccgttaacggaatcaaggcgcttggcatctgcggagtgaacgtcacagtcccgcataaagtcgcgatcatggagcatctggatgaaatacatgaaagcgcgaaagtactcggggccgtaaataccgtcaaaagagagggagacaggctcatcgggtataatactgacggagatgggttttataaatccttagtcaaagtattggacaaaccgatatcagagctctccatcctcatgattggggcgggaggagcggcaagagcgatttttacgacgatcgtccgcggagagccgaaacaatttgacgtttgcaaccgcacgccggaaaaagcagaaaatctgattgcggctgctccctcttttcagcagaaacgcgcccttactttaaaagaagctgaaaatcagcttgaacaatatgacgtcattattcatacaacatctgtcggcatgtatccgaaaacggatgccgtgccgctctcattggaacgggccaaaacgggcgccatcgtttgtgatatcgtatacaacccgattcaaacggcgttcttaaaagaagctgaaaaaagaggtttaacaacccttgacggtgtcggcatgtttgtggaacaggccgcactgtctttcaagctgtggacgggacaagagcctgacagcggcttaatgagagcaattgttgaaggaaaactaggaggaacacaatgttaacaggaaaacaaaaacggtttttgcgttcaaaagcgcatcatttaacgcctatttttcaagtgggaaaaggcggagtcaacgaaaacatggtgaaacagattgccgaggctttagaagcaagagagctgattaaagtcagcgtgcttcaaaactgcgaagacgataaaaatgatgtcgcagaagcccttgtgaaaggcagccgctcacaattggtgcagacgatcggaaatacgatcgtattgtataaggaatcaaaggaaaataaacaaatcgagcttccgtaaggtggttgacatgaagaaaatcggaatattcgggggcacatttgaccctccgcacaacggacatcttctgatggctaatgaagtccttcatcaggcggagctcgatgagatttggtttatgcccaataaaatccctccgcataagcagaatgaagactttacagacagccggcaccgggtggagatgctgaagcttgccatcagctctaattccggctttaagcttgagcttgcggaaatggaccggaaaggcccttcttatacctatgataccgtccgtttactgaaggagcggcacccgaacgacaagcttttctttattatcggggcggatatgattgaatatctgccgaaatggtacaaactggacgaacttctcacgctcattcaatttatcggagtgcggcgcccggggtatcatattgagaccccgtacccgctgctttttgccgacgttccggaatttgacgtttcgtcaacgatgctgagagaacgtctcaaagcaaaaaagccgacgcaatacttaatgccggataaagtgaggcagtatatagaggagaatgatttatatgaatcgtgaggaagcacttgcctgcgtcaaagagcagctgaccgagcatcgctacatccacacaatcggcgtgacagatacggcggttattctcgcaggccggttcggagcagacccgaaaaaagcggaaatggcggctatttttcatgattatgcgaaattccggccgaaagaagaaatgaagcagatcatcgtgcgggaaaaaatgccggctgagctcttggattacaatgccgagctgtggcatgcccctgtgggagcgtatttggctgagaaagaagcggggatcactgatcctgagatcttggatgcaatccgctatcacacgtcagggcgtcccggaatgacccttttagacaaagtcatttacgttgcggattacattgaacccggacgccatttccccggagtggaagaggtgcgccgtctggcggaaacagatctgaacgaagcgctcatacaagcaatgaaaaatacaatgatatttctgatgaaaaaaaaccagccggtctttccggagacgtttgcaacctataattggctggtgtctcaaaattgacaggaggaatttaaagaatgaatcaagcttccgtattaaaaatcgcggcaaaagcatgcgacgataaacgtgcagaagatattttagcgctggacatggaaggaatctcacttatagcggattactttttaatctgccacgggaattctgataagcaggttcaggcaattgcgcgtgaaattaaagatcaggcagaagaaaacggcattgatgtcaaaaagatggaagggtttgatgaggcccgctggattttagttgatctcggcgacgtcattgtccacgttttccataaagatgaaagaagctactacaatcttgaaaagctatggggcgacgcaccgctcgcagagcttgaactcggcttgaactcatgatttaccaaggcttcgccggcgtatatgacgagttaatgtcacatgcgccgtatgatgaatgggcgggctggatcgaagcgtctcttccggaaaagggaagggtgcttgatcttgcctgcggaaccggagaaatatccatcaggcttgctgaaaaaggctgcgaagtcacggggattgatttgagtgaagatatgctgagctgtgcccagcagaaaaaaacgggaaagccgattctttttctccaacaggatatgagagagctttccggttttgaagaacagtttgatgccgttgtcatctgctgtgattccctaaattacttaaaaacgaaaaatgatgtcttaagcaccttcaaaagtgtttttcaagttttgaaggagggcggcctgcttctgtttgacgtccattccccatttaaaatgacggagctttttccggacagcacccatgcggatcaggatgagcagatcagctatatctggcaaagctttgccggcgatgaagagctttctgtcatccatgatatgtccttttttgtatggaacggacaatcttatgaccgttatgacgagacgcatgagcaaaaaacattttacattgaagaatatgaacaaatgcttgcagagaccggatttgaactgaagaaagtgacggccgattttacagaccggcctccttcaacagagtctgaacgtcttttctttacggcaggcaaaccaaaaaccatcgtttaaacggaacgatggtttttaaaatgcattttttgcgattggcgcgataaagcactttatggcatactcagttacacgtgaaattgcttcttcactaacgatatatcttcatcgtatttgttatgtgtacgctgaaagacacggttgaacatatcctgaacaccgctttcgagagccttcagtccttctccggtgacgccgccttttacgcatactttttcctgcaaggcgggaagtgtgtaatgccctgtttccagaagctttccgagaccgacaagcatttccgtcgacataatcacggcttcttctttggtgatgtccgtttcttccactgccgcgtcaataaagcgctgaacgagataactcataaaagcgggcccgcagctgacaatgtctgacgccgctcttgtaatgccgctgctgatttctacaggttttgaaatacgagtgaacagcgtttgaatatccgcttttgcagactcgctgcagcttttgccgaacgtaacaagcgagacgccggccaaggcgcggttcgtaatgctcggaatgacgcgggccgtctgacacggaaccgtatgttcaatctgatccgtctgaacggggctggtaatggagattaaaatgtggtctttccgtaaatgcggtgtgagttttttcagcaaaggatatatatccagcggttttacacaaatgaatattatttcattatcctgtacgagcttttcctgatcctcggtgacatggatgccgctgaaacgttcttttagttttaatgctttttcgattgttctgtttgtgatggtgatatgtgagggatcggcagcgtttgattcgataaacgattcaatcaggatcgttcccatgtttccggtgccgataaagcctattttcaatgaattcccctcctttttcccttaatcctctaaaccttatgcggggaggcaatgcaatatgacgaaagcgatgatgacggagcggctgcggcggaacctgaaaattctgggcgcttgtcttgcggcaggggcggtttttatctgcatttggctgtttcgttctgaaaaggaagagccggtcaaacagcagtccgtgctcggccaaacagcctcagcatccgttgcggacaaaaaagacaccgcagccgataagattatgattgatgtgaaaggtgcggtccgaaatcccggcgtgtatgaaatgaaagcgggagacagagtgacgcaagccattgaaaaagccggcggcctgaagaaaaaggcggatgaattgaatgttaatttagcagagcagctgcaggacgggacgatggtttatattccgagtgaaggcgaagaggagaatcgcccgaaaacagcggcgggtgaaaaggagaatgcagctgtcaatatcaatacggcatctctggacgaacttcaggcgatttccggggtggggcagaaaaaagcggaagcgattatcgcctaccgagaagaaaacggacggtttcagactgctgaagatttgatgaatgtatcaggctttggagaaaagtcatttgagcggataaaaacttccattacggtaaagtgaattgacggttctgcttaaatctatgtaaacttagaaaagcaacaagactttttggagggaacacttgtggaacgaatctcatggaatcaatattttatggcgcaaagccatttgctggcgctgagaagcacatgtccgagactgtcagtcggggcaaccgtagtcagagacaagcggatgattgccggcggatacaacggctcaatcgccggcggcgtccattgcgctgatgaaggatgccttttaatagataatcattgccagaggaccatacatgcagagatgaatgcgattctgcaatgttctaagttcggtgttccgacggagggcgccgaaatttatgtgacgcattatccttgtattcaatgctgcaaatcaattatccaggcaggcatcaaaacggtctattatgccgaagattacaaaacacagccttatgcaaaagagctgttcagccaagccggagtcaaggtggagcaggtcgaacttgatgaaatgatcatcgatctgaaaaaccgcgaaaaattgtcttttgtagcaggtctgattcagcaattatctgatgcgggagttaaggcagatgaactgaaaaaaattcatgaacaggccaatgagctgtttaccagttacgtataaatgaaatataaataccttcttctgcctctggcggcggtttctgcaactgcgggaattgccgctgctcatgtcttctgggttctgctcctttttcttctgtatcttctctttattattgtaaaaacaaagcaccatgctccggttatcgtctgcctcgtttctttttgtgtttatttctttctttatacggtttgtgacgctgcgaatgtaacgcgctatcaggccggcagttatactgaacaggccgtcattactaatattccgaaggttgacggagcgaaaatgtcagccgttatccgtacacatgacaaggaaaagtgggcggcttcgtacaaaatccgttctcttgaggaaaaaagactcattgaacagcttgaaccggggatgcgctgcacgtttacaggctctctggaacagcctgcacatgcgacggttcccggaggttttgattataaggaatatctttactctcagcagattcactggttattttccgtgacttccattgagcagtgtgaaaaatccaaacagccgctgtttaaactgctgaacatcagaaaaaatttgatttcgatcattcggaatcacgtgcctgaatcttccgccggaattgttgaagcgctgaccttaggtgaaagattttctatagaggacgatatactgagtgcatatcaaaatttgggagtcgttcatttaatggcgatttccggaatgcatgtcggtcttattacggcgggattattttatgctctgatcagaatcgggctgacaagagaaaaggcgggaattttgctgctgctgtttttgccggtgtatacgctgctgagcggtgccgccccatccgtattgcgcgcatccctcatgctgggattttatatcgccggaactcttgttaaacgcggcattcattcctctgctgcattgtccttgtcttatctgctgcttctgctgtttaatccttacttcctttggcaggcgggcttccagctttcctttgcggtaagcgcctctttaattctgtcatcctccattttaaagaaagcaggggaaagcagacttgccgggcttgcgatggcttcattcattgcggagctcagctcacttccgtttcttctctatcattttcagcagatttcacttgtcagttttccgatgaatatggtgatggtgcctttttatacgttatttgtcattccggtttctgtcatcggtttccttcttcttttactctcaaggcagatgggagaatgtttgtttggtatgtttgaccttgtgatgaagcctgtgcatgatttcattacatatgcggcatccgttgatttatttactatgattgtgtcaaagcctgactttgtttcccttcttctgcttgcggtttccgtttttacgctttttgcggctttggaaaagggaggttttttaaaactcaggaaatcggctctttttttctgcgcggttttggcttatttaatatgccgtccgtatttcagtccatggggagaagcggatatgcttgatatcgggcagggagactcactgtttataagcgcgccgcaccgcaaagggaccgtaatggttgatacagggggagtgattgcttatcccggagaatcatggaaagaaaaacgccacccatattctatcggcgagaaggttttgattccctttttaaacggaaaaggggtgaaaaagctggatgcgctgattttaacccatgcggatcaagatcacatcggggaagccggagtgttaatcaaaaatcatagagtcaaacggttaattgtccccgtaggattcgtaaaagaaccgaaagatcagaacatattaaatatggcgaaagaaaacaacattcccgttgccgaagcaaagcggggcgacaccattacagccggggatcttcagtttcaggtgctgtctccggagtcgtctgacggaaggagtaaaaatgattcgtcactggtgctttggacggtttttggcggagtgagctggcttttgacgggagatttagaatcggacggcgaaacggaagtgctgaaaacgtatccgaaactgaaggctgatatattgaaggcgggtcatcacggcagcaaaagctcaacgagtgaagcctttttgaaacagcttcagccggaagcagcgctgatttcagcaggaaaagagaatcgataccatcatccgcatgaagaagtgctggatcgtttgaaggcgtactctgtcaatgtgcttcgcaccgatatcagcggaacgattcaatacagatttgaaaaaggcgccggaacgttttccgtcttccctccatatgatatagaagaaaccagggcgcaagaagtaaaaaagactgccgattgacagcagcccggaatgcggctaagagccgataagatggatggctgttgccatcacgaacaaaaaggcgaaaaatccgaaggacacgacaaaaccgacagctgagtcaacagcatcatttcgtttgctttgaacgtttttttcaaaatcattcaatttcatccctcctgacttccctaagtatactggaattgttttgaaaaatctagaagtgatggtaacgttttctgttcttgtgattatcgcctttttacaagcagacccgggagcttgtgaatcaggcgtttattataaatgaggaagctgtcctttttaaagcttcctctttactatttgccgaactcaatttaggatagaaggggatcaagaaagagaggaagtcatacgatcatggtatttgatgtttggaaagccctgaaaaaaggggatgtccgctccgtttattgcttatacggaaaagaaacgtatctgctccaagagactgtcagccggatcagacaagctgtcgttgatgaggagactaaagattttaacctgtctgtttttgatcttgaagaggatccgcttgaccaggccataaccgatgcggaaacgtttccgtttatgggagagaagcggctggttatcgtaaaaaatccgtcttttttaacaggggaaaaaaagaaagaaaaaatagagcataatacaagcgctttggagacttacctgaaggagcctgcgccttatacggtctttgtgattgtggctccgtatgaaaagctggacgaacggaaaaagctgacgaaagcgctgaagcaaaaagcccttatgattgaagctaaggagctgaatgcaaaggagacgactgattttacgattaatctggcgaaatccgaaaataaaacgatggatacagaagctgctgagcatttggttctgcttgcaaacggccatctgtcttccatatatcaggaaatacaaaaactctccgcctacaccggtgacagacatgagatcacgcttgaagatgtccgggagcttgtcgcaagaagtttggagcagaatatttttgagctgatcaacaaaatcgtgaaccgaaaacggacggaaagtcttcaaatattttatgatcttttaaaacaaaacgaagaaccgatcaaaattatggcgctgatcgccaaccaattccgtctgattatgcagacaaagtattttgcgggacaaggatacggccaaaagcaaatcgcttccaatttaaaggtgcaccccttccgggtaaagctggcggtggatcaggcgaggcttttttctgaagaagagctgcggcgtattatagaaaggctcgcagtgatggattatgaaatgaaaacggggaaaaaggacaagcagctcttgctggagctctttctccttgagcttctccggactgaatgaaaaaaacgatccccgttaaagggatcgtttttgtattatgcagaaagtccgttcacttgtttcgcaagtctagatttgtatcgagctgcggcatttttgtgtacaagacctgttttcactgctttatcaatgcgtttcgctgcttcagaaagagcagttttcgctttatccgcttcgttgttagcaacagaagcttcaacttgtttgattgcagtacgcatagcagatttgattgtcgcgttatgagcgcggcgttcgttgtttgtttttgtacgtttaatcgctgatttaatgtttggcatgtgtttcacctcctaagatacaacctgtagcacagtgtcttaaggttaaatcttcttcacaatagaacaaattgtattctatcaaacagaactttagattgcaatataaatgtaaagtatttttcgttgatgggtaaattcgcatgattcgttttgtaaatggtcacactatgtaccacgatgattgaaggaggtctttcctgtgaaaaacaacgaactggatgtcaatcaatttctgatacggacggatttagcggtagaaacgaaacaggcggtaaaagacggacaatccggtcagacaaaagaaataaacgggtttattgaaaaagaacgcgacaagggcggcattaaagtcagaaccgtcgatattaccaaagaaggcgccgagctatcggggaaaaagcagggacgctatgtcacgatcgaggctcaaggggttcgggaacacgactctgacatgcaggaaaaagtaacggaagtgtttgccgaggaattttccgcctatctgtcggcattaaagattccaaaggatgcaagctgtttgatcgtcggtctcggcaactggaatgtgacgccggatgcgctcggccctctcgtgaccgaaaaccttcttgtgacacggcatctgttcaggcttcagccggaaaacgtacaggaagggtacaggccggtcagcgcgcttgctcccggtgtgatgggattaacgggaattgaaacgagcgatattattcaaggtgtgatcaaagaatcaaagccggattttgtgattgcggtagacgctcttgcggcaagagccgttgaaagggtgaacacgaccatccaattttctgatacgggcattcacccgggatcaggcgtcggcaataagagaaaagaattaagcaaggagacgctcggcatccccgtcatcgcaatcggggtaccgactgtcgttgatgcggttacgatcgcgagcgatacggtggattatatattaaagcatttcggcagagagatgaaagatgacagcccgtcaagatctctggtgcccgccggaatgaacttcggcaaaaagaaggtgctgacagacgaagaccttcccggagaaaaagagcgccaatcctttctcggtattgtcggcacgctggacgaaaacgaaaaacgccagctgattcacgaagtgctttctccgctcggccataatctgatggtcacgccgaaggagattgacacctttattgatgatatggcgaacgtgcttgcaaacgggttaaacaccgcccttcatgaaaaagtgtcacaagataacaaaggctcttataatcattaaaatggttctacctcctctagcttgttcatagagtaattactagacaagcgctggagggattcaaatcatgagaaaaaaacgcagaaaccgtcaaattgtcgttgcagtaaacgggggaaatgcgctcaagggcatgtttttgtttatgacaagccttatcgttattttcgtattatcgggtgtgctcacatcgcttcgccctgaactgaggctttcttcggattctcttcacggaattgccggagaacttccgggtgacgcgtttgcacacctcctcggcatggaaaatcattatttcgcctcagagcttcctgaaaaagactcttttcagctgtcccggctgtccttaaaactggcgacaagcattaatatggaagacccgcggagtttcttgggacgtgagctgccgggatttgcccaatatgatacggagatccttctggcggggcaggggacggattatacgaatatgccggctgaatctccgccgccgtcaaaggtgatggaaaaagaaaaagaagtgaacatggcagaaatcgaaaacaaaacgaaaaaagaagaaacggcgccgccgaaacattcaacaggcagcaaaaaagtcgtttttatttaccacactcataataccgaatcctatcttcctctgttaaagggggaaacaaatccggataacgcccgccattcgaaggccaatgtcacgcttgtcggagatatgttcggaaaagcgcttgaagcgcaaggtgtaggagcgaccgtagataaaaccgacattcaggcccgcctgaacaaagacggtttaaattatgcgcgaagctacgacgaatcaaggccggtcgtaaaaagcgcgctcgccaaaaataaaaacctgcaatataccatagacattcaccgggattcccgccgcaagaaaaatacgacagccgacatcaaaggaaaaagctatgccagagtcgccatcgtcgtcggcaaaaaaagcgctaattttgaagaaaactataaactcgcaagtgaacttcataagctgatggagaaaaaataccccggcttaagcgtcggtgttttatcaaaaggctctccgggagataatggagtatacaaccaagatttaaacgaccggtcgcttctgctggaattcgggggcgtggataacaatcttgaagaactgaggcgcgcatcagatgccgtggccgatgtgttcagcgaactgtactgggatgcagaaaaagtcagctcgcaatcaggagagaagaaaaaacaatagaaatcaggtgattcgaatgatccgttttaccggcaaatgcctgctgatcgccattgtcatgtttttcggcgtattgttcggcatgcagcaggcaaacagcggaatgcttgatatgaaaggatacaaagacccttccttaaaaggagcattcacgctcggcggcggagaaggacaggaaaaagaagcttccattttggggcaaaccgttacggcgaaagatctggaagaaaaacaaaaacagctggaacaggcggaaaccttcaacctgttttcaaaagccggagaaaccctttcaaataccgtgacggactcggcgcaggcgatgtatgagtgggtttcgaaactgaaccgttagcattgatgaagagaaaagcggatgattccttaaaggaagcttttctctttcttgttttaattgaatgtttacaatcctattgatataatctaagctagtgtattttgcgtttaatagtaggagtgatagattgtgacagataaagaaaagcgtttagagaggcagtcaagaatccggaatttctccatcatcgcccacatagaccacggcaaatcgaccttggcggatcggattttagaaaaaacatcggcgatcacccagcgggaaatgaaagaacaattgcttgattcaatggaccttgaacgcgaacggggaattaccatcaaattaaattccgttcagctgaaatacaaagcaaaagacggagaagaatatatatttcatctcatcgacacgcccggacacgtcgactttacatatgaagtatcgcgaagcctggctgcctgtgaaggcgcgattctcgttgttgatgcggctcagggaatagaagcgcagacattggcgaacgtctatctggcgcttgataatgatcttgagattcttcctgtcattaataaaatcgatctcccgagcgcagagccagaacgtgtgcgtcaagaggttgaggacgttatcggccttgacgcttcagacgccgtcctcgcttcagcgaaagcgggcatcggcatcgaagacattttagaacagatcgtagaaaaagtgccggctcccgcgggagatccggaagctccgctgaaagcgctcatctttgactcgctttatgacgcgtaccgcggagtcgtcgcgtatatcagagtcgtagaaggaacggtcaaaccgggccagaaaattaaaatgatggcaaccggaaaagagtttgaagtgacagaagtcggtgtgttcacgccgaaagcaactccgacagatgaactgactgtcggcgatgtaggctttttaactgctgcgatcaaaaatgtcggtgacacacgcgtcggtgacacgataacaagcgcggccaatcaggctgccgaagcattgcctgggtatcgcaagctgaacccgatggtgtattgcggtttgtatccgatcgatacggccaaatacaatgatttaagggaagctcttgagaagcttgaactgaatgactcatcgcttcaatatgaagcagagacatcccaagcgctcggattcggtttccgctgcggatttttaggtatgcttcacatggaaatcattcaggagcggattgagcgtgagtttaaaatcgacctgatcacaacggcaccgagtgttatctatgatgtgtatatgacagacggcgaaaaggttgttgttgacaatccgtccaacatgcctgacccacaaaagatcgaaagaatcgaggagccgtatgtaaaagcgacaatgatggtgccgaacgattatgtcggtgcggtgatggagctttgccaaggaaaacgcggcaattttatcgacatgcaatatttagacgcaaatcgtgtcagcattgtctatgacatgccattagcggaaatcgtatatgaattttttgatcagctgaaatcaagcacaaaaggctacgcgtcctttgattacgagctgatcggctacaaaccgtctaaacttgtcaagatggacattatgctgaacggagaaaaaatcgacgccctttcatttatcgtgcatcgcgattacgcgtacgaacgcggaaaggtaattgtagaaaaactgaaagagctcattccgcgccagcactttgaagtaccgattcaagcggcgatcggccagaaaatcgtggcccgctctaccattaaagcgatgcgtaaaaacgtattggctaaatgttacggaggagacatctcacggaaacggaagcttcttgaaaaacaaaaagaaggaaaacgccggatgaagcaggtcggctcagtagaagtgccgcaggaagcgtttatggccgttcttaaaatggatgacagcccgaaaaaataacggaagccgccgcagccccgcgctgcggcttctttctgtaaagaagaaggtgtttcaaaatgaaatcagcttatattcatattccgttttgtgagcatatctgccactattgcgatttcaataaatattttattcagagccagcctgtcgatgagtacttaaactcactcgaaaaggaaatgataaatacaatagaacggacgggacgccctgatctccgcacgatttttatcgggggaggcacgccgacatcgctctcacccgtccaactggaaaaattgatggattccattcaccgcgtgctgaagccttctgacggactcatagaatttgccgcggaagcgaatccggatgatttatccccggaaaaattaaaaatcatgaaaaatgccggtatcaaccggctgagcttcggtgttcaaacctttgaagatgagcttttacaaaaaatcggcagagtgcataaacaaaaggacgtattcacttcctttgaacgtgcgagagctctcggcttcgacaacatcagtctcgatttaatgttcggcctgccgggtcagacgctggccgatcttgacaattccgtcaaaacggctttgtctcttgatgcggagcactattccgtttactcgctgatcgtagagccgaaaacggtgttttataatttaatgcaaaaaggccgcctgcatctccccgcgcaagaacaagaggccgagatgtatgaaacggtcatgaggcagatgagtgaagcgggcatccgtcaatacgagatcagtaactttgcaaagcccggatacgagtcccagcataatctgacgtattggagcaatgaagagtatttcggttttggcgcaggcgctcacggatatatcagcggcacgcgcaccgtcaacgccgggcctgtgaaacattacatgcagctcatcgaagaaaaggggctgccttaccgtgacacgcacgaggtgacacgtgaggagcagattgaagaagaaatgttcctcggtctcagaaaaatgtccggcgtacaaaagcaagcttttctcgataaattcggacgctcggtcgacgaactgtttcccgatgttctcaaagatttaaccgaaaaaggcctgatctgtgacacggaagaatcggttgcattaacgcatgaaggcaaattattaggaaatgaggtttttggcgcttttttgggtgagttataattgacatttttcttttggtttgttacttttgatatagaattagcactcgctgaccttgagtgctaacaggggtgatgatgatgttaacaaatcgtcagctgttgatcctgcaagtgattattaatgattttatacaatcggcgcagcctgtaggatcaagaactctttcaaaaaaagacgagattacattcagctctgcaacgatcagaaatgagatggctgacttggaggaattgggctttattgaaaaaacccattcatcctcaggacggattccgtcggaaaaagggtacaggtattatgtcgatcatttgctgtcacccgtcaagctgacaaaaaccgatctggatttaattcactcgatatttaaagaaaaaatcttcgagctggaaaaaacagtccaaaaatcagcgcaaatcctgtccgatctgacaaactacacatcgattgtcctcgggccgacgctgagcgagaactatcttaaacagattcaaatcgttccgatccagccggataaggcggtcgccatcctcgtcacgaacacggggcatgtcgaaaaccgcaccatcaatttcccggctaaagtggatttggccgatattgaaaaactggtcaatatactaaacgatcgattagcgggcgtgccgatggacgaactgaatgagcgcattttcaaagaggttgtcacatatttaaggcagcatatcgccaactatgacagcatacttgaatcgctccgctccacattccatccggcggcccacgttgagaaattgtttttcggcggaaagatcaacatgctgaatcagccggagttccatgatattgaaagggtccgctcgctcttatctttaattgaaaaagagcaggatgttctgaagctgtttcagtcatcaaaagccgggatttcaatcaaaatcgggaaagaaaacgactacgaagaaatggaaaactgcagcttaatcacggccacctatacagttgatacgaagcagatcggatcaatcgcgattatcgggccgacgcgcatgaattattcaagagtcgtcagcctgctgcagcatgtgacttcggacttgtcaaaagcattcacaagtttgtatgatgaataagggaattttggcaatcattttcagtcatctttttacagcatttgagggaggtgaacacaatgtcagaagaaaaacaaaccgcagaacaggttgaagcagcagaacaagaagaagtgacagaacaggcagaacaagccgcttcacaagagcagcatgaagaaacggcaggtcaggaagaagcccttcagcaccaaattgatgaattgcagggtttgcttgatgaaaaagaaaacaagcttttgcgtgttcaagcagactttgaaaactataaacgacgcagccgccttgaaatggaagctgctcagaaataccgttctcaaaacgtcgtaacggaaatccttccggcgctcgacaactttgaacgggcgttacaggtagaagctgaaagcgagcagacaaaaagcttgctgcaaggtatggaaatggtccgccgccagctgatggacgcacttgaaaaagaaggcgttgaagccatcgaagctgtcggtcaggaatttgatccgaaccttcaccaagccgtcatgcaggtggaagatgaaaacttcggcagcaatattgttatcgaagaattgcaaaaaggctacaaactgaaggatcgcgtcatccgtccttcaatggtaaaagtgaatcaataactacatagcaggaggtaattcaaagtgagtaaagtaatcggaattgacttgggtacgacaaactcatgtgtggcagtgcttgaaggcggagagcctacagttatcgccaacgctgaaggaaaccgtacgactccgtcagtcgttgcatttaaaaacggcgagcgccaagtaggggaagtggcgaaacgccaatccatcacaaaccctaacacaatcatgtctgtcaaacgccatatgggtactgactataaagtggaaatcgaaggaaaagactacacgcctcaagaggtgtcagctattatccttcagcatctgaaagcatatgctgaaagctacctcggcgaaacagtttcaaaagccgttatcacggttcctgcatacttcaacgatgcggagcgccaagcgacaaaagatgccggtaaaatcgccggtcttgaagtagaacgtattatcaacgagccgactgcagcagcgcttgcatacggacttgataaaacggacgaagaccaaacgattcttgtttacgaccttggcggcggtacgtttgacgtatctgttcttgaacttggcgacggcgtgtttgaagtccgttcaactgccggtgacaaccgtcttggcggggacgactttgaccaagtcatcatcgatcatctcgtagcagaattcaaaaaagaaaacggcattgatctttcaaaagacaaaatggcgcttcagcgtttgaaagatgcggctgagaaagcgaaaaaagatctttccggcgtttcatctacacaaatttctttaccatttatcacagcgggagaagcaggtcctcttcaccttgagctgacactgacccgcgctaaattcgaagagctttccgctcaccttgttgagcgcacaatggctcctgtccgtcaggctcttcaagatgcggatctttctgcgagcgaaatcgacaaagttatccttgtcggcggatcaacacgtattccagccgtacaggaagcaatcaaaaaagaaacgggtaaagaagcgcataaaggcgtaaaccctgatgaagttgtagcgctgggtgcagcgattcaaggcggcgtcatcacgggagacgtaaaagacgttgttcttcttgacgttacaccgctttctcttggtattgaaacaatgggcggcgtgttcacaaaactgatcgaccgcaacacgacaattccgacgagcaagtctcaagtattctcaactgcagctgacaaccaaacggctgttgacattcacgtgcttcaaggtgagcgcccgatgtctgccgacaacaaaacgctcggccgcttccagcttactgatatcccgcctgcaccgcgcggcgtaccgcaaatcgaagtttctttcgatattgacaaaaacggtatcgtaaacgtaagagcgaaagatttaggcacaggaaaagaacaaaacattactatcaaatcttcttcaggtctttctgatgatgagatcgaacgcatggtaaaagaagcggaagaaaacgctgacgctgatgcgaagagaaaagaagaaatcgaagtccgcaacgaagctgaccagcttgtgttccaaacggaaaaaacattaaaagatctggaaggcaaagtggacgaagagcaagtgaaaaaagcaaacgacgcgaaagacgcgctgaaagccgctatcgagaaaaacgaaattgaagacatcaaagcgaaaaaagatgagcttcaaacaatcgttcaagagctttctatgaagctttacgaagaagcggcgaaagcgcagcaggctgaaggcggagcaaacgctgaaggcaaaaaagcggacgacaacgttgtcgatgcggaatacgaagaagtaaaagacgacgaaacgaaaaaataagttctttcccgcatggctataggcggaaaaacacacagcatattctgattcaacagacagaaagtcaaagtcaggcatctcttggctttgactttttttcttgcccgggataaaaggaattgaaaaaacataattcaaaatgatacaatctaatttatgtgagaaattcgggagagtgaagcgagatgagtaagcgtgattactatgaagtgcttggggtaagtaagagcgcttcaaaggatgaaatcaaaaaagcctatcggaagctttcaaaaaaatatcatcctgatatcaataaagaatccggagcagatgaaaaattcaaagaggtaaaagaagcgtacgaagcgctctcagacgaccaaaaacgcgctcaatatgaccaattcggccatacagaccctaaccagggattcggcggcggtttcggaggcggcggagacttcggcggcttcggtttcgatgacatcttctcaagcatcttcggaggcggcacgagacgccgtgacccgaatgcgccgcggcaaggcgcggatctgcagtatacaatgaccctgtcatttgaagacgcggcattcgggaaagaaacgatcattgaaattccgcgcgaagagaattgcgaaacatgtaaaggatctggcgcgaagccgggaacaaagccggatacgtgctcgcactgcggaggttcaggccagctgaacgtcgaacagaacacgccgtttggcaaagtggttaaccgaagagtctgtcaccactgtgaaggaacaggaaaaatcatcaaaaacaagtgttctgactgcggcggcacgggcaaagtgaaaaaacggaaaaaaatcaatgtcacgattcctgccggtgtggatgacggacagcagctgcgcgttccgggccaaggtgaaccgggcgtaaacggagggcctgcgggagatctgtttgtcgtattccatgtgcgcgcccacgagttctttgagcgcgacggagacgatatttattgcgaaatgccgttaacgtttgcgcaagcggcactcggagacgaagtggaagtgccgacgcttcacggaaaagtgaaattgaaaatacctgccggcacacaaacaggcacgaaattcagattaagaggcaaaggcgttcagaacgtccggggctacggacaaggcgaccagcacattgtcgtccgcgtcgtcacaccgacgaatctgacagacaaacaaaaagacatcatccgcgagttcgctgaagtcagcggaaacctgccggatgaacaagaaatgagtttctttgacaaagtaaaacgcgcatttaaaggcgagtaatgattggataggagttggtagttttgaaatggtccgaaatcagcattcacacaacacatgaagcggtcgaacccatctcaaatattttgcatgaagctggtgcgagcggggttgtcatcgaagatccgcttgatttaatgaaagagcgtgagaatgtttacggggaaatctaccagctcgaccccaatgattaccccgatgagggtgtcattgtcaaagcgtatctgccgatcaacagtttcctcggcgaaacggtggacggcattaaagagacgattaataatctgcttttgtacgacattgatttgggcagaaacacaatcaccatttctgaagttaatgaagaagaatgggcgacagcttggaaaaagtattatcatcctgtgaaaatttctgaaaagttcacgatcgttcccacttgggaaacgtacacacctgttcatacagatgaactgattatcgaaatggatccgggtatggcattcggtacgggaacgcatccgacaaccgttctgtgcattcaggcgcttgagcgtatcgttcaaaaaggcgaccgtgtcattgatgtcggcaccggttcaggaattttaagcatcgcggccgccatgcttgaggccgaatcggttcatgcgtatgaccttgatccggtcgctgttgaaagcgcgcgtctgaatgtgaaattgaacaaagtgagtgatgcggccgaagtgaagcagaacaatttgttagacggcatcacgggcgaacatgatgtcattgtcgcaaatattttggcggaagtgattctccgctttacatcacaggcgtacgacctgctcaaagacggaggccattttattacttcaggcattatcggccagaaaaaacaggaagtaaaagaagcgttggaaaaagccggctttaccatcatagaaattctgtctatggaagattgggtcagcatcatcgcgaaaaaataacagttagtaggtgtcacagcgtatgcaacgatattttatcgagctcacgaagcaggagatggacgaaactcccgattttcaaatcacgggggaagacgtccaccatatagcgaacgtcatgagaatgagtgcgggcggccggattatctgctgttcgaaagacggccatgaagcgttatgcctgcttaaagaggtttctaaagatcatatatcatgcagcattgctgagtggacgggtgaaaaccgtgaactgccgttaaaaatcaggatcgcaagcggcctcccgaaaggcgataagcttgaatggattatccaaaaagggaccgagctgggggcaagtatgttcatcccctttcagggcgccagatccgtcgttaagctagatgacaaaaaggcaaagaaaaagcgggagagatgggcgaaaatcgcgaaggaagcggcggagcaatcgtaccgcaatgaaattcccgaagtgaaaaccgttcatacgttccggcagctgcttgaaatggcggagaatgtcgataaatgtgtcgttgcatacgaggagtcatcaaagcagggagaaacgggcgctttcgctgcggagctcaaaagccttccgcaaggttcgtctcttttaatcgtattcggccctgaaggcggtctgactgagtctgaagttcatcagctttcagaaaaaggcgccgtcttatgcggcctcggaccgagaattttacggactgaaactgcgcctctttacgcgttaagcgcagtttcctatcatacagagttattaagaggtgatcagtaatggcaactgttgcttttcatacccttggctgcaaggtcaaccattatgaaacagaagcaatctggcagctgtttaaagatgcgggttatgaacgaaaagaattcgaacagacagcagatgtatatgtcattaatacatgtacggtaacaaacacgggagataaaaaaagccgtcaagtcatcagacgggcgatccgccaaaatcctgacggcgtcatctgcgtaacagggtgctatgcgcaaacctctccggcggaaattatggccatcccgggtgttgacatcgtcgtcggcacgcaggatcgtgaaaaaatgctcggttacattgagcagtacagggaagagcgccagccgatcaacggcgtcggcaatattatgaaagcacgcgtgtttgaagagctggatgttcccgcttttactgaccgtacaagagcgtcgttaaaaatccaagagggctgcaacaacttctgtacgttctgcattatcccttgggcgcgtggcctgcttcgttcccgcgatccggaagaagtcattaaacaggcgcagcagctggtggatgccggctataaagaaatcgtcctgacggggattcatacgggcggctacggcgaagatatgaaagattataatttcgccaagcttctccgcgagcttgatacacgtgtagaaggactgaagcggatcagaatttcatctattgaagcaagccaaatcactgatgaagtgattgaagtgctggatgcgtctgataaaatcgtccgtcaccttcatatcccgattcagtcaggatcaaacaccgttctgaaacggatgagacgcaaatatacgatggaatttttcgcggaccgtttaaataagctgaaagaagcgctgccgggtcttgccgtcacatctgatgtcatcgtcggtttcccgggagaaacggaagaagaatttatggaaacataccggttcattaaagaacataagttttcagagcttcacgtattcccttacagcaaacgcaccggaacacctgcggccagaatggaagaccaggttgacgagaacgtgaaaaacgaacgggtgcataagctgattgcgctgtctgaccagcttgcaaaagaatacgcctccgattatgaaggagaggttctggaaatcattcctgaagagacgtttaaagagtctgatgaagacggcatgttcgtcggctatacggacaattacatgaaagtcgtcttcaaaggcacggaagatgtaatcggcaaacttgtcaaagtcaaaattcaaaaagcgggctatccgtataacgaaggacaattcgtccgcgtcgttgaggatgaaatgacccgaaacatgcgcatgtcttcataacagataaaaaaaccggtgccttcccgcatcggtttttttacggtttcggaggaatcagcctgtcaatcagccggtaaaacaaatgtgtgaacggcagaaacaataaggcggtgactacgttaaataacaggctgaaatgcgcaatcatctgcgcgggatcatcagacaggcgctccgtaaaacctgctgatgcggacaggaagggaaatacgagcagcacgccgagaatattaaacacaacgtgagcaccggcggtctgtctggcggcataaccgcctgaaacagcagccatgacggccgtgacgcatgtcccgatattagatcccagaacgacgctgaccgcttgttcaatgccgatcaccccttcgttcataaaactcatcaaaatgccgatgcagacggagcttgaatgaatgattgccgtcaatatcatgccgataaaaagagcggaccagctcgaatcattcacatgccgcaaaacctccgcccccgccttcatttctgtcagcggaacggcgagccggctgaagcatgtgatgcaaaaaaagatgatgccgagaccgaggaagcttatgccgatctgcctgaacggatatttacggaggaggataaacacaaggcctccgataaaaagcacccaaatgagcacatccatctttatggctaaaaactccgtcgtaaacgtggagccgacattcgtgccgagaatcatcggaatggtccgtttaaaagataaagcgcctgcgctgacaaagccgatgacaatgaccatgaaggctgagctgctctgaagaaaaccggtgaacacgatgcttatgagaaaagctttcaaagggtggtcggtaaataagagcaggcttttctcaatttttgaatacgttaatgcgatcagccccttcctgagcaggctcattccgagtaaaaaaaccaggataagtgcggtaaagagaatcagtatcatcaaacgaaacacccctttccatcattatatagacaagcagccttattcatgacggaaaagtgagctcgcttagttgacctgactgatggcttatattataatgtcaaagtacatgtttatatatgtatctttttaaaggtagtcgattggtgtattcggagggagggaaagagaatgtcaaaaacggtcgttagaaaaaacgaatcgcttgaagatgctcttcgtcgcttcaaacgcagtgtatcaaagacaggtactttgcaagaagcaagaaagcgcgaattttatgaaaaacctagcgtaaagcgcaagaaaaagtcagaagctgctagaaaacgcaaattctaaaagagggtggatttatgagtcttcttgagcgacttaaccaagatatgaagctgtatatgaaaagccgtgagaaagacaaactgactgtcgttcgaatggtgaaagcttcacttcaaaacgaagcaattaagcttaagaaagacagtttgaccgaggatgaggaacttactgtcctatctcgtgaacttaagcaacgtaaagactccctccatgaattttcaaacgctaatcgtttagatttagtagataaagttcaaaaagagctggacattttagaagtttatttaccgaagcagctttctgaagaagagctgcagacaatcgtaaatgaaaccatcgctgaagtcggtgcgagctccaaagcggacatgggcaaagtgatgagtgctattatgcctaaagtaaaaggtaaagctgacggcagcgtaattaacagacttgtcagcagtcaattatcttaattgacaagaaaaaagacatctttccttgagagatgtctttttttatacataaaaaaatgaaactaaagtacatttgttacgtatataaagaagaacgaaacgggaaggagggtatatttgccttgttccgaaaaaaaaccggaattgctgttgctctattgggcttatttgtattatctttattaggggttcaattgaacgcgaaagctgatcacccatcggtttatgtcatcccggttgagaaaaatgtcgaacaggggctcgcctcgtttttatcgcgttctttcaaagaagcgaaggagtccggcgcgtcacacattattcttgacatcaatacaccgggaggcgccgttcaatcagccttggatattgcggatatcatcggccgcgcggatgtgcctgttaccgcttacgttaataaacgggcgctttctgccggagcgtatatagcgctccaggcagatgaaatctatatggcgccgggcggaaaaatgggtgccgcagccatcatcgacggaaagggaaacgcggcagacaaaaaggcccaatcactgtggcatgcagaaatggaggacgcagcggttaaaaacaaccgaaatccgaaatacgccctggccatggcagatcccgccattaatgcaaaggaagcgggcgccccaaagggaaaactgctgacactgacagctgaaaaagccaaggaagtcggatattcggagggcacggtttcagaccttgatgctttatatacaaagctcggttttgacaaagcggatgttcaccatgcagaagaaggtttcgtcggcaaactgggcagatggctgacaaatccgtttgttgtccccgtcttattaacgcttgctttgcttggtttgaccattgaattgttctcgccgggcctcgggataccgggtgccgtcggactgacggccatcctgctgtttttcaccgggcatatcgctgccggattcgccggctatgacagcgtattcttattttgcgcgggcttggtttttatccttttagagatatttctgcccggaggcataatcggtcttatcggtattgcaggcgtcatcgcgagcctctttctcgctgcgggcagctttaccgtaatggcggtttctctcttgatcgccattgctgtgtctattacagcctttatcatattaacaagggtgttggggaaacgaatgaaattctttaaaaaattaatattaactgattcaacaagcacggagagcggttatgtttcaaatcagaaccggacggagctgttgggaaaagtcggcgttaccgctacagccctcagaccgtcaggcaccgtcattattgatgatgaacgtctggatgtcgtctcggaaggatcattcactgaaaaagacagacaggtgaaagtagtgaaagcggaaggctcacgcattgtcgtgagagaaatatagatgataaccttgaggaggaattagatggaactgtcaagtttggcgattttagcattagttgctgctgccattattgtgttagccatattcttcacctttgtaccggtgatgctatggatttcggcgcttgcggcaggagtcagaatcagcattttcactttggtcgggatgaggctgcggcgcgtcataccaagccgcgttgtcaatccgttaattaaagcgcacaaagccggcctgtccgcaacaacaaaccagctcgaaagccattatctggccggaggtaatgtcgacagggtggtcaatgccctgattgcggcacagcgcgccaatattgagctgtcatttgaacgctgcgcagccattgacctggccggacgtgacgtattggaagccgtacagatgagcgtcaatccaaaggtcattgaaacaccgtttattgcgggtgtcgccatggacggaattgaagtaaaagcaaaagccagaatcacggtaagagccaatattgagcgccttgtcggaggagcgggagaagagaccgttgtcgcccgtgtcggagaagggattgtctcgacaatcggttcttcacacaatcataaaaaagtgcttgaaaaccctgatatgatttcgcagaccgtacttggcaaagggctggattcaggcaccgcatttgaaattctttcgattgacatcgccgacgtggatatcggcaaaaacatcggagcgattcttcagacggatcaggcagaagcagacaaaaacattgcgcaggccaaagccgaagagcgccgcgccatggcggtcgcccaagagcaggaaatgcgcgctcgcgtagaagaaatgcgtgcaaaagtcgtggaagcagaagccgaagtgccgcttgcgatggcagaagcgttgcgtgaaggaaacatcggcgtcatggactatatgaacatcaaaaatatcgacgcggatacggacatgagggattctatcggcaagctgacgaatgaccagcaagatgaagaccaacaataacctctctattaaggagggagccgctatatgcacgagattctgacaaatccgctcgtcattgccgccgtcatcggcattatatcggcaatattcggcaagaaaaacaaagatgaaaaacgtccgccgggtacacgtcccggaaatcaggcaaaaaagcaggatcaaaaacagccgcagaaagagcataagccaaaagcggaagaattgcctgccgtttcagaagagaacccttttgagcaaaaaagaagggaagctgaaaagcgcctagcggagacggagcagatgtttaacgggcttgaacataagctgacatccgcacgcgcacgaaacgcgtctctgaagaaatcagccctcaaaataaataaagaaactgcggtccaaggcattatattcagtgaggttttgggcccgccccgtgcaaaaaaaccgcaccggaccacgcggaacatcggtaaaaaataaagtgttagaaccccttttcaaatcatacatatgagatgaaagggggttctttttttatggggcaaagaaagaatcgtgtaaaggcatggctgacaagagcattggaaattcccccggacgttatgatggatctgcctcgtattacgatggtcggcagacttcatatctacatagagaatcacagaggcctcctgctgttcagtgaagaagaagtcaggctgatgctcaagcaggggcagtgtatcatatcaggaaaaaacttggtcattaaggcaatccttcctgaggaaatccttttggaaggcacgatagatcacgtacgatatgtcgattcataaagccggggggaaataatgtgaaaaacaaatggctgtcatttttttcgggtaaagtccaagtggaagtcaaaggaaaagggattgaacggctgctgaatgaatgcacgagaaacggaatcgccatctttgcggtgaaaaaaaagaaagactgtgttctgctgatgattcagcttcaagatgtacatgctttcagaagagtcatcagaaaacatgaatgcaaagcaagctttacaaaaagaaagggtcttccctttctgcttctcaaatcaaaattaaatctgggcttcactgcgggatttgtgatattttttgttatattgtttcttttgtccaacatgatttgggaaattgatattaaaggggccaagccagagaccgagcatcagatggtaaagcatcttgaagaaatcggtgtgaaaaaaggccgtttgcaatttttaatgatgacgccggagaaaattcaaaaatcattaacaaacggcatcgataatattacgtgggtcggtgtggaattgaacgggacagcccttcatatgaaagtggtcgaaaagaacgaaccgacaaaagaaaagtacgtaagcccccgccatatcgttgccaaaaagaaggcggtcatcaaaaggatgttcgtgcaaaatgggcagccgatggcttttgtgaacgatcatgttgacaaaggacagctcctcgtctcaggactgatcggaaatgaagaccggaaagtcgcctcaaaagcggaaatttacggagaaacatggtacaagtcagaagtaaccgtgccccttgaaacatcatttacgctatatacgggtaaagtaaggacgaagcacaagctgtctttcggatcatggggcgtgcctttttggggctttgaatttaatgagaagccgctgaaacatccgaaaacagaggaagaaaagcatccgtttcaatttctggggatgaagcttccggtttcttacgtttcagaacagacaagagaaagtgaaacatccgtgcggacttatacgaaaggcgaagcggttcaggccggtatcaaaatgggaagacaagatgtagaaaagcgattaaacggcagcggagaggtggaaagtgaaaaagttttgcaccaatccgttgagaatggtaaagtaaagttgattattctctaccaagttatagaagatatcgttcaaaccacacctattgttcagggagactaaagaatggcagaacatttacttgcgattaatcacaaactgaaaagcccggacgaagcactttctttgttcggcagccaagatgcctttttacatttaatggagaaggatctgggcattagcctcatcacacgcggtgaaaccatttacgtttccgggaatgatgaaacatttgagatcgctgacagattattgggctcgctccttactttgattcgcaaggggatcgagatttcggaacgtgatgtgctgtatgccgtgaaaatggcaaaaaaagatgaactggactattttgaaagcatgtatgaagaggaaataacgaaaacggcaaaaggcaaaccgatccgtgtcaaaaccatcggccaaagagaatatgtggcggcgatgaagaaaaacgacatggtgttcggcatcgggccggcgggaaccggcaaaacttatttggcggtcgtaaaagcggtgcacgctttaaaaaacggccacattaaaaaaattattttaacaagacccgctgtggaagccggcgagagcctcggttttctgcccggagatttaaaggaaaaagtagatccttatctgcgcccgctgtatgacgcgctccatgatgtgctcggaagcgaccatacggagcgtcttatggaaagaggggttatcgaaatcgccccgcttgcctatatgagagggcggacgcttgacgacgcgtatgtgattcttgatgaagcccagaataccacgcccgctcaaatgaaaatgtttttgacgagattgggttttggctctaaaatgatcattacgggcgacgtaagccaaattgacctgccgaaaggcgtcacatcgggacttgcagtagcgaaggacatgctgaaggacgtaaacggcatctccgtgattgaacttgaccagacagatgtggtcaggcatccgcttgttgcaaaaattattgaagcttatgataagcaaaagtaatgcaaaaatgacccgatctcccgttatcgggtcatttttatatgatgtgttcctgatgtttcagggaggaggttcttgttttgaaaaagaagggaaagggcaaaagcgcccgggtacggttccgcagtttcagacatgcccgctcagcccatgtgctgctgtacctgctgctttcagcgatcatgtttggtttgctctttattcatgtaaaacctgaatcacttaatttggatttgtttgcagtcagtgataagacgatttacgcgcccgccacagtggaagatcagcaggcgacggaatcgaaaaaacaggcggccgaagatgcggtggaagatcaatacactctgaaaaaaggctataccgacaaccggcttgacctgatcacttccatttttgacagcatcggcgaagtaaaaaaagatgcggaaaaagacaaaaagtcaccttcagaaaaatcactggtaaaatcggtgaaaaacaagctgacacaggatgtcaatgaatccgtctcggaagatgccattaaatcgcttctccatgcaaacaatgaagatttctcatttgtgagggattccgtcattaccgcggtgaatacggtgatgagcagtgaaattccttctgaaaagcttgctgaagcgaaggataaggtcgcaaaagagctgaaaagcgcttctgtgccgtcaaaatatttagcggctgcgactgaaatcggaaaatacgcggtcatcccgaattacgtatttgatccgaaagcgaccgatgaaaaacgccaggaagcgtcagacagcgtccagccggtacagatcaaacagggacaggttctcgtggaagagaatgatctgattgaccgggaagtatacaggaagcttgaactgacgggtcttttgaataattccaacctgttaaaaccgatcagcggtctccttctgatgatcggcctgtttattgccacgcttgtctactattttgagaaacagcagcaggagcttaagctgaaaaataaatctcttttgctgttttctatcattacaacgcttattctcgtcattatggaagtcgtcagtctctttcagaagattgaatacaccaatatcggctatcttgtgccgatcgccgccggcgcgattttaatcaggctgctgctcaatgaaaggctcgccattttaggaagcatcattctggcgatctgcggcagtatgatgtttaatcagggtgtgacgggaacatttaattacgtcatcggcatttactatttaatcagcagcatttcaggcattttgtttttgggaaaacataatgcgagatcaaaaatattgcagacgggactgttcgtctcatttattaatatgattatcgtgctgtcgcttttattaatacaaaatacggcgctgtcaccggttgaaatcggaacgcttatgctgatgggggtcgtctcgggacttgcttcatccgttttgattatcggtctgatgccgttttttgagacgggattcggcattctttcaacaatgaggctgattgaactgtctaatccgaatcatcccctgcttcgaaagattttaacggaaacacccggtacatatcatcacagcgtcatggtggcaaatctgtcggaagcggcttgtgaagccgtaggggcaaacggtcttttagcacgggtcggagcgtattatcacgatctcggaaaaacgaaacgtccgcaatattttattgaaaatcagatgaatatggataatccgcatgacaagctgtctccgcagctcagcaaaaatatcattatcgcacatacgacagacggtgcgaatatgctcagaagctataagtttccgaaagagcttgtggatatcgcggagcagcatcacggaacgtcccttttaaaattcttttattataaagcgaaagaaaagggcgaccagattacagagaaagagttccgctacccggggccgaagccgcaatcgaaagaagcggctattatctcagtggccgacagcgttgaagccgccgtccgttccatgcataatcccaatcccgagcggatcgaaaaactggtgcggggaattatatccgataagcttcaggacggacaattctcagaatgtgatctcacgttccgagaactggatacgatcgcaaaaacactatgtgcgactttaaaaggaattttccactcccggattgaatatccggaggctacgaagaaggtgaaataaatgagtttactcatagatattgttgatgaaacgaacagcgtctcagctgatgcgcttcaagaagtggagaagctgctccaattcgcggcggaaaaagaaggcgttcaggaccaggctgaagtatcggtcacgattgtgacaaatgaggaaatcagagaaatcaacagagactaccggggaaaagacactccgactgacgtcatttcgtttgcgcttgaagaagaaggcgaagacgaggttgaaatcgtaggcgccgacatgccgcctgttttaggagatattatcatcagcgctgacagaacgaaagagcaggcggaagagtacggccattcgtttatgagagagctcggttttctggccgtgcacggctttttgcatttgcttggctatgatcacatgacaaaagaagaagaggaagaaatgttttcaaagcaaaaggatttgctggatgagtatggactcacgagatcataaaaacgagtggagcaggttcctgaagagctttgtccatgcatggaggggaatctggaaaacggcgcggtcagagcggaattttcaatttcatattaccgcggcctgcgccgttatcgtttgcggttttctcaccgggctgagcacagccgaatgggccgttgttttggtgctgatcggagggatgcttgctttggagcttttaaatacggcgatagagcatgttgtggatttagttaccgatcagtatcacccgctcgcaaaagcggcaaaggacgcggccgccggagccgtttgcgtctttgccgtgatatcgtgtatcattggtttactcatcttcttgccgaagatatgttagcagaagattcttacaattattttacattgccaaaaatgggcgtgaaaaaccaatcataattatgtaaaataaaagtgacagcggtatcatacaggataaaggtaagagaggaattaagtacacatgaacagacaagaattgattgcagaagcattaaaagcgcgggacacagcgtatgtgccgtattcaaatttcagagtgggagccgctcttcttaccaaagacggaaaagtgtacagaggctgcaacatcgaaaatgcggcatacagcatgtgcaactgtgctgaacgcacggcaatattcaaagctgtttccgagggggatacggaatttgcgatgctcgccgtggctgcggatactccgggaccggtttcgccgtgcggagcctgcagacaagtaatttccgagctgtgctcaaaggatatgcttgttattctgaccaacttacaaggacaaataaaagaaatgactgcggaagaattattgccgggcgcattttcatcggaggatttacatgacgaacgaaagctttaaatcaggatttgtatctatcatcggaaggccgaatgtaggaaagtctacctttttaaacagggtcatcggtcaaaagatcgccatcatgagcgacaaaccccagacgacaagaaataaagtccaaggggtgctgacaaccggcacgtcgcagaccatttttattgatacaccgggcattcacaaaccaaagcacaagcttggcgactttatgatgaaagtggcgcagaatacgctgaaagaagttgacttggtgttatttatgattaacgccgaagaagggtacggaaaaggcgacgagtttatcattgaaaagctcggacagacgtctacaccggtttttctgatcgtaaacaaaattgataagatccaccctgaccagctgcttcttttaattgatgagtaccgtacgcgctatccgtttaaggaaatcgtgccgatctcagctttggaagggaacaacgtcgaaacccttctcgcgcagattgaagcgtatttaccggaagggcctcagttctatccgagcgatcaggtgactgaccatcctgagcggttcattatttctgaactgatcagagaaaaggtgctccatctgacaagggaagaagtgccgcacagcatcgctgtcgctatcgagtccattaaagggcaggaaaacggctccgtccatgtcgctgccaccattgtggtcgagcgggattctcaaaaaggcatcgtcatcggcaaaaaaggagcgcttctgaaagaagtcggcaaaagagcgcgggctgatattgaagctcttttgggctcacgcgtttacctggaattatgggtgaaggtgcagaaggactggcggaataaaatgtctcagctgcgtgatttcggcttcaaagaggatgaatattaattcatctaaggcgcatgcctgaggtgtgagattacctcacagaagcagggattcgttagcaaaatttgtttaacatgaaaaggaggacatcaggtcaagataagggtaagaatttggatttgcaagctagtttaatgatgaaaggtgggttttttgtgttgaattttacctggaacgtattttctcaaacaggaagtgttgatacgtaccttctttttaaagaactggaaaaagagaacctggaaagacccgaagaaccggaagatgagctagcccgaattgattttccaattttgtaaacctcttggcccctcccattgttggaaggtgcggaaatgctgactaaatgtgaaggaatcgtgctccgtacgaatgactacggggagacgaataaaatcgtgacattgctgacgagggaacacggcaaaatcggcgtcatggcaaggggcgccaggaagtcagccagccggctgtcagcagtcagccagccgtttttgtacgggtcatttttaatgcaaagaacatccggactcggcacgctccagcagggtgaaatgattctcagcatgagaacgatcagagaagatttatttttgacggcgtatgccgcttttatcgctgaactcactgacaaaggaacggaagagaagaaaccgaacccctatttattcgaattgattctcgaatcctttaagaggctgaatgacgggactgacccggacgtgatcaccttcatcgtgcagatgaaaatgctcggcgtcatggggctgtatccggagctgaatcattgtgtccactgcaaaagcggggaagggacgtttcatttttcgataagagataacgggtttatctgccaccgctgctttgaaaaggatccgtacagagttccgatttcgccgcaaacggcaaggctgctaaggcttttttattactttgatatcggaaggctcggcagcgtctcgttaaaacaggaaaccaaaaatgaaattaaacgggtcattgatctgtattacgaagaatattcaggactttatttaaagtcaaaacggtttttagatcagatggaaagcatgaagaaccttttggatgaaaacaaaagttgacattctgcccatctttttatatgatcatttattataaaatatgttgcagtgacagaaagaagtacttgcgtccaactcatacaagcgaccttagggcagtgtaagctaaggatgagcgcgcaacgaaaggcattctcgagcaaccctttaaaaagaggctgagtgattcacatcctcagcaactagggtggaaccgcgggagaactctcgtccctatgtttgcggccggcaagcatagagacgggagttttttggttgccgccgcacttgtaaaagaatggagaaagtggaggtgcttgaaatgaacattcaagatatgattttaaccttgcagaagcactggtcgaatgaaggctgtgtgctcatgcagtcgtacgatgtggagaaaggcgcaggcacaatgagcccgtatacatttttacgaagcatcgggccggaaccgtggagagtggcttacgttgagccgtccaggcggcctgcggacggacggtacggtgaaaacccgaacaggctctatcagcatcaccaattccaagtcattatcaagccgtcgcctgataacattcaagagctttaccttgattcattgcgtgcgctcggcattgacccgcttgaacatgatatccgtttcgtagaagacaactgggaaaacccgtctttaggctgtgcaggtctcggctgggaagtatggcttgacgggatggaaattactcagtttacatacttccagcaggtgggcggaattgaatgtaaaccggtatccgttgagatcacatatggtattgaacgtctcgcgtcatatattcaggataaagaaaacgtctttgatcttgaatggacgtcaggatttactgtgaaagatttatttatgatggctgaatatgagcattccgtttatacttttgaaacatctgacgtggatatgcttttccatttgttcagcacctatgaaaaagaagcgatcagacaaatggataacgggctcgtgcatccggcctatgattatgtgctgaaatgctcccacacatttaatctgctcgatgcaaaaggcgcgatctcggtgacggagcggacgggttatatcggccgtgtccgcaacttagcgagaaaagtggcaaaaacgtattatgaagaacgggaaaaattagggttcccaatgcttaaagaggagggctcttcccatgagtaaacaagacttgcttttagagatcggactcgaggaaatgccggcgcggtttttacatgacagcatggtgcagctcggtgaaaagctgaccggctggctggctgaaaaaaatatcgcccatggcgaagtgaaactttttaatacgccgagacgtctggcagtatatataaaagacgtagcagaaaaacaggctgatattcaggaagaagcaaaaggccctgcgaaaaaaatcgctctggatgctgacggaaactggacaaaagccgctatcggattttcaaaaggccaaggcgccggagtggatgatctgtatataaaagatgtaaacggcacggaatatgtcttcgttcaaaaattccaggcgggacaagagacgaagacacttttaccgcagctggaaaatttgattgccggaatgcattttccgaaaaacatgcgctggggcacgcaggatctgcgctatgtccgtccgatcaaatggattatcgctctctttggaaaagacgtcatttcgtttgaaatcacaaatgtcgagacgggccggaacacacagggacaccgctttctcggccaagaagtatctgttgatgcgccgtcatcatatgaaaagctgctgaaagaacaaagcgtcattgctgacccgaaagaacgcaaacaaatgatccaaagccagctggacgcgcttgcagccgagaagaaatggaacattccgatcgatgagaacctgctgaacgaagtcaaccatctggtggaatacccgacggcgctttacggatcttttgaatccgagtttctttctattcctgaagaagtgcttgtaacaaccatgaaagagcatcagcgctacttcccggtaaaagatgaaaacgggaatctgctgcctcattttattacggtaagaaacgggaacagccatgcaattgaaaatgttgcccgcggaaacgagaaagtgctgagagcaaggctttcagatgctgcgttcttctacaaagaagaccaaaagctcaacattgatgaaaacgtgaagaaactggaaaatatcgttttccatgaagagctcggctcccttggagataaagtaagaagagtggccgccattgcgggcaaacttgccgtccgcctgaaagcggatgaacagacgcaaaaccttgtgaagcgcgccgcagagatttctaaatttgacctggttacacatatgatctatgagttccctgagcttcagggcgtgatgggagaaaaatatgcgcgcatgctcggtgaagatgaagccgtcgctgccgctgtcaatgagcactatatgccgagagcggccgggggagaagtgccttcaaccttcaccggcgcggttgtggcgttagctgataaactggacacgattgcttccttcttcagcattgacgtgattccgacaggttctcaggacccgtacggattgcgccgtcaggcaagcggcatcgtttccattctgatcgaccgcaactggggcatttcttttaaagagctgctgtcattgacagaaacggaaaaagaaaatgagctcctcgatttctttacacagcgtctgaaatacgtcttaaacgctgaagacatccgtcatgacgttatcgaagccgttctggacagcacagagcttgagccgtatgcagccgttcataaggcaagagtgcttgagaagcacctcggcacacccggctttaaagaaacggctgaatcactcggccgggtcatctccatcagcaaaaaaggcgagagccgcgatatcaatccggatctgtttgaaaatgaacaggagaaaaagctgtttgacgcttatcaacaaacaaaagacagtatcgcggaaagctttgcctccaaaaactatgaacaggcgcttgccgtgctcagcggattaaaggagccgattgaagactactttaatcacacgatggtaaatgcggacgatgaagcattaaaaaccaaccgtttagcgcaaatgaccgctcttgcagatgtgatcaagtcttttgctaatatgaatcatcttattgtaaaataaagaaaaagacggttgctgtgtgatcggcaatcgtcttttccccttttacataaacatcacagaatgaaaacatagataaagaaacccttccataaaggtggtgagtacgatcgaattaaataaacggcaagaacaaattttacagattgtaaaggaaaacggcccgattaccggagagcatatcgcagaacagctcaatttaacgagggccacgctgcggccggacttggccatactcaccatgtcaggcttcttagaggcccgtccgcgggtcggttatttttatacggggaaaacgggaaatcagctgcttgcggataaactgaaaaagctgcaagtgaaagattttcaatcgatccctgttgtcatcaatgagaatgtctcggtatacgatgccatctgcacaatgtttttagaagatgtcggcacgttatttgtcgtagatcgtgatgctgtcttagtcggtgtgctgtcacgcaaagatttgctgcgggcgagcatcggccagcaggaacttgcctcaataccggttcatattatcatgacaagaatgccgaatatcgccgtctgccggcgtgacgattatgtgatggacatcgccaagtatttaattgaaaaacagatcgatgccctgcccgttattaaagatacggataaaggctttgaggtcatcggccggtttaccaaaacgaatatgactaagatacttgtcagtttatcagaaaatgaaatcatataagcttgaaaactaacggggggataacatggacaatcgcatcatttatgtagtatcagactcagtcggagaaaccgccgaactcgttgtaaaagcctcgctcagccagtttaacggctcagcagatgatacgcatatcagaagaataccttatgtggaagatatcggcaccattaatgaagtcgtgtctctcgccaaagcggacggcggcattatttgttttacgctcgttgttcctgaaatgcgcaaatacctggttgaacaagcggaaaaagcgaatgtgctgtattacgatattatcggtccgctcatcgataaaatggaatcggcttacggtctgaccgctaaatatgaaccgggccgcgtccgccagcttgatgaagattatttcaaaaaggtcgaggcgatcgagtttgccgtcaaatatgacgatggcagagatccaagaggcattttaaaagccgatatcatcctgctcggagtatccagaacgtctaaaaccccattatcacaatatcttgcccataagcgtctgaaagtggccaatgtgccgatcgttcctgaggtcgatccgccggaagaactgttcagcgttgatccgaaaaaatgcatcggcttaaaaatcagccctgataaactgaatcatatacgaaaagaacggttaaaatctctcggcttaaatgacaaagccatttacgccaatatcaacagaattaaagaagagctggagtatttcgagaaaatcgtggaccggatcggctgccaagtcgttgacgtttcgaataaagcggtcgaggaaacagcgaacatcattcatcacctcaaaacaaagggccgataactcaggacgctttatcctgggtttttgggtatgcaaatagggaataaacaaaaaggatggcatcttcgcgaagtttgtattataataaaaaattgtgataaaatgtttatttttaggtttaagcttcgtgtgatacgaataaactattatgggtaagatgtcaagaataactcccggaaatttttcgacaaagctcaaaatagatccgcagtcatggagcatatgcgatttcgcttgtttttatgcaggagattgatggagggatggagaattagtcttctaaatgaaaaagaaaagacgatttttgtcgatgcagacgcatgccccgtaaaagaggaaataatgctcattgcatcgcaatacagcgttcgggttattttcgtcgcatcatttgaacactaccagctttccagaagcaaagacgagaactgggtatacgttgatcctcataaagaagcggcagacttatatatcgcaaaccatgtgagatcgggagacgtcgtagtcacgcaggatatcggtttagcctctcttttgctgaacagaaatattgccgtcttatcggaaaggggccgttcttatactgaagacacgattgacttcgctctgatgagccgtcatatgtcaggcaaaatgagaagaagcggcattcattccaaaggacctaaaaaattaaataaagaagatcggaatcgatttgttaccctgcttaaaaaaatcctgtcgaatgatgaagggatttcaaatcaaaacatcgaataatgtacgacggagtgttataagatgggaaaccgcataccagatgaagtagttaatcaggtgcagcagtcagcagacattgttgaagtcataggtgattatgtccaattgaaaaagcaaggccgcaactactttgggctctgtccgtttcacggggaaaacacgccctcgttttccgtctccagcgataagcagatctttcattgcttcggatgcggtgcgggcgggaacgttttctctttcttacggcagatggaaggctattcatttacggaggctgtttctcaccttgcggataaatatcagattgatttccctgatgatataacgattcactctgcatccaggcctgaatcttccggagagcagaagatggcggaagcccacgagcttctgaagaaattttaccatcatttgctaataaatacaaaggaaggccaggaagcgttagattaccttttatcaaggggttttacgaaagagctcatagatgagtttgaaatcggctacgcgctggattcctgggatttcatgacgaaattcttgaaaaagcgcggttttgaggaagaactgatggaaaaagcgggtctgctgatcagaagggaagacggcagcgggtattttgaccgtttcagaaacagaattatgtttcccattcatgatcaccacggagccgtggcggctttttcaggaagggcgctcggaagccagcagccgaaatatatgaacagcccggaaacgccgctgtttcataaatctaagctgctgtataactttcataaggcgcgcctgccgatcaggaaagaggagagagccgttctgtttgaaggcttcgctgacgtcatatccgccgtcagctcaggcgtaaaagaaagtatcgccacaatggggacgtcgctcaccgaagaacatgtgaaaatcctcaggagaaatgttcaggaggtcattctctgctacgattcggataaagccgggtacgaagctacgctgaaagcggccggcctgcttcagaaagccgattgtaaggtaagagtaagcatgctgcctgacgggcttgatcctgatgattatatcagaacccggggcggagaaaaattccggaccgatatcattgatgcaagcgttacggtcatggcttttaaaatgcagtatttccgcaaagggaaaaacttatctgacgaaggagaccggctcgcttacatgaaagaagtgctgaaagaaatcagcgctctttccgggtcgcttgagcaggaaatgtatgtgaagcagctcgcctcagaattttctctttcggtagaatctttgacggaacagctttccatctacgccagacaaaacgcccccggcgacaaaaacgccgaaccgcagacaagacgggcccgggtgacgacaaaagcaaaacggcgccgtctccgtcccgcctatgagaacgcggaaagacttctgctcgctcatatgctgagagaccgaaacgtcataaagaaagtgattgagcgtgtcggctttgaatttaacattgacggacatcgtgcgctggcagcatacctgtacgctgtatatgaagagggggctgacatgacgccgcagcatcttatggcgagagtgcaggatgaggaaatcagccagctgctttcagatatagggatgctccaagtaaacgaggagctctcagaggccgagttatccgattacgtaaaaaaagtgttggatcaccgaaaatggtcaatgataaaggaaaaagaagcagaaagagcggatgcggagaggcagaaagacttcgtgaaagctgcgtctctggctcaagaaattgttgcattgaaccgatcattaaagtaacaccacaaagaggcttgcgttctgattggcaatgattccttgcggaggagcaaatagatcgcttaacctcatcatgaattgtcatttattatccgcagccctgcatgctgaaaaagagagaaggcttccgggtcggataagaaacataccgcttttagaattcgttgcaagctttggaaggagggatccataatggctgataaacaaacccacgaaacagaaacagaacttacattagaccaggtaaaagagcagcttactgaaactggaaaaaaacgtggcgttttaacatatgaagaaattgctgaacgcatgtccagctttgaaattgaatcagaccaaatggatgagtattatgaatttttaggagaacaaggtgttgaattaattagtgaaaatgaagaaacggaagatcctaatattcaacagcttgccaaagccgaagaagaatttgaccttaatgacctcagcgtaccgcctggcgtaaagatcaatgatccagtccgcatgtaccttaaggaaatcggacgggtaaatcttctttctgctaaagaagaaatcacctacgctcaaaaaattgaagagggtgacgaggaatctaaacgcagactggctgaagcaaaccttcgtttagttgtcagcattgctaaacggtatgtcggccgcggcatgcttttcttagacttgatccaagaaggaaacatgggtctcatgaaagccgtcgagaagtttgactaccgtaaaggatataaattcagtacgtatgcgacttggtggatcagacaggcgattacacgcgccatcgctgaccaggcgagaacaatccgtatcccggttcacatggtggaaaccatcaacaaattaatccgggtgcagcgtcagcttcttcaggatcttggcagagagccgacaccggaagagattgctgaagacatggatcttacacctgaaaaagtccgtgaaatattaaaaattgctcaagagcctgtttctttagaaacgccgatcggtgaagaagacgactcacatctcggtgacttcatcgaagaccaggaagcgacatctccgtcggatcatgcggcatatgagcttttaaaagaacagctggaagatgtgctggatacgttgacagatcgtgaagaaaacgtgctgcgtctccgtttcggtctggatgacggacgcacaagaactttggaagaagtaggcaaagtgtttggagtaacgagagagcgtattcgccaaattgaagcaaaagcgcttcgcaaattgagacatccgagcagaagcaaacgtctgaaggattttctcgaatagaatggaacgggtctttttgatccgttcttttttatgtataagatatatggataatatacctttattttactggataagcatatgttttgcaaatgagtttggaaaaaatgcggcatgtcctgaaagggggaaaatgagataagtttatttatattctttattgtaagcgtatacaattcattatacaatagaataaagataattttgtgataaacaaaacagttatttttgctttttgtataaattgtgaaatcaatgaaattgctgagcaagaccatttactttttgtaaaaataagttagaattagaagtgtttacatagggggagaatgaaaaagggggatggagatatgaagtggaatccgctgattccttttttgctcattgcagtgctgggaatagggctgactttctttttagctgtaaaaggcaatggagatgcgcatcagatcgcaagcggcggtgaaagcaaaaatgccgagaaggaaactgcaaacgcttcacctgaagagatttataaagcgaactgcatcacctgtcacggggaaaactatgaaggtgtttcagggccgaacttaaaaggcgtcggcaaaagaaaagatgtcgctgagattaaaacaaaaattgaaaaaggcggcaacgggatgcccgcaggccttgtgccggccgaaaagctggatgacatggcaaaatgggtttctgacattaaataaagctttaccggtccctatataaaagacatatgaaaaactctatccgccgcttggattccgggcggtttttttatatgatagtaaaggaaaaagaacctgagaaaagttgtgatattgtgaatgaaatgaagttatctaaaagattgcagtctgtggcggaatatatccctccgggtgcgctggttgctgatatcgggtcggaccacgcgtatcttccttgctatgccgttttgaatcatttggcaagccgggcaatcgccggtgaaattacagacggaccgtttctatccgccaaacagcaggtggaaaaactggacttaagcactcttatctccgtaaggaaaggtgacgggctgagcgtccttgaaaaaggagaagccggcgccattacaatcgctggcatgggcggagcgctgatcgctcatattttggagtccggaaaaacgaaattgacggggcgtgaacggctgattctgcagccgaatattcatgccgttcatataagagagtggctgtatcaggaaggctatgaactgattgatgaagtgattctcgaagaagacggaaagtgttatgaaatcctcgttgcggaaactggcgaccgtgatgcgccgtatcgggacgtgccgatggctgccggaatgcttgcgggtccgtttttattaaaagagaggaatgaagtgtttcttcggaaatggagccaggaacttaagcatactgaacaaatttatgaacagatcagccgcagcgcaaagcatgaaagtcatgaaaaattagctgaattgaaagagcggatttctctgctgaaggaggtaatcggacatgcctaaacatgtgaacggacaggaaatcatccagctgtttgaacaattttcaccgaaggcttttgcggtggaaggagataaaatcggcctgcagatcggtacattgaataagccggtgaaaaatgtcatggtgacactggatgttctggaacaaacggtagatgaagccattgagaaaaaagttgacttaattatcgcccaccatccgccgatttttcggccgcttaaacagatcaccactgatcagcctggcggaagactgattgagaaatgtataaagcatgatattgccgtatatgcggctcatacgaatcttgatgtggcggacggcggtgtgaacgatctgcttgccgaagctctcggcctgacagacacagaagtgctcgtcccgacatattcggacccgatgaaaaagcttgccgtatatgttccgaaagactatgaagaagctgtaagaaccgcacttggcaacgccggagcgggacatatcggcaattacagccattgcgcgttctcctctgagggaatcggcagctttaagccgctggacggggcagaaccgtttatcggacagacgggagagctggaactcgtccatgaagtgagacttgagaccgtttttccggcaagtatggagaaaaccgtcgtaaaagcgctgaaaaaaagccatccgtatgaagaggtggcatatgatatttatccggtggagcagtctccgcttgaaaaagggctcggccgcatcggaaaacttcagcaagacatgacgcttgaagagtttgcgctgtttgtgaaagaaaagtttgacgttaacggagtccggatggtcggagagcgaaacagcaaggtgaaaaaagtcgcggttcttggcggtgacggaaataaatatatttatcaggcaaagcggaagggtgcagatgtttacgtgacgggcgatctttatttccatgtagcgcatgatgcgatgatgatcggattaaacgtcgtggacccggggcattatgctgaaaagatcatgagaaaaggcacggctgagaagcttacggcaatggccggggagaaaaactatgatgtgcgcattttcgcttccgaaacagatacaaacccatttaccttcttataaaaaaactgaggccccgggcctcagttttttatttttactttcggaaggatttttttaagcggcacactgtgttcaagctgccatgtcgattcatcgttgtggtcaaactgctctaaaaagcggatgacttcctttgtaatcggtgtcggtgttgatgcgcctgcggtaacggcgacggtattgacgtctttcagccattcgagcttcagttcactgatgtctccgattcggtaggcttttgttccggcgatttcttctgacacttgcgccagtctgttggagttattgcttttcggatcaccgacaacaatggttaagtccgctttttttgcctgctctgatacagcttcttgacgaacctgtgtggccaggcagatttcctgatggtattccacgtacgggtacttttctttgactgattccataatatcgtggacgtcccactgggacattgtcgtttggtttgtaacgattaatttctcagcctgaatatcgagatttctcacgtcttcctctgtttcaacgagatgaacgatttcaggagcgacgccgacggctccttcaggctcggggtggccttttttaccgatgtatatgacgtgataaccttcagcttttacttttcggattaagtcatgtgttttcgtgacgtccgggcatgtggcgtcaatcgtaacaagccctttttcctcagcggcttttcttacttccggagataccccgtgagccgtgaaaataacggttcctttttccacctgctttaaaatctccagacggtttgtgccgtcaagcgtgtaaatgccgtcttcctcaaacgcatctgtgacatgcttattatgaacaatcattccgagtatatatataggtcttggcagtgttttatcgagtgacgcgtttttggctatgaccatggcatcaacaacaccgtaacagtagccgcgcggcgatattttgataacgtccaatgtagatgtcctcctatcaaaagtgagtgtagaggcaatataaaaagccgtagttaaacggctcaaatcttgcattcttctgatctcattatagctaatctttcgtgagatatcaaagaatgttaaatatataatttcggctttgatctgcccgatgttctttttggacgttgctgttccgctgagtctgcctgtgcggcgtctttttcttttgaagcggatgctttttcagacgtcttctttgatgttttggatgaggcgtctgatttgttttcatcttctgtttcatctgttttttcagcttcatcctttttgtcctgttcgtctgtttctttcgtctcgtcagattcattctcgtcatcactgctgcttaattggctgtaaagcttcatcatggcgggcagactccgtactaaaggaccgtactgctggatcatcggcgtaacctgctgcgccacgccgagcaccttctgaacgttgccgagcatgctcgacagggatgccggacttgccaggttctgtattccctgcagtcctgcacctgctcctccgctggccgccgccggtgccgacgcggcagcgcttcctcctcctgaaccgggtaaaaaacgggaaagcatcccttttaagccccctccgccgcccgtgcctgcgtttctcaggcccgctccggcaatctgctgctgagggaaaagctgccgtccctgctgcatcagctgccgtcccggcaatgacggtcttcctcccatcatcatacgcggattcataaacggccggccctgctgcgccatatttctcatcggctgctgtggaaacatacttgtacctcctttctgtctctctgctattacaatatgcatcggagggggcatttgcttttctgtctcgaaaacaggattcccccaagacatggtgtttttaagtaaaatcggttataatgtgatgatggacacagaatgtgccgctttaaggagctgggaaaaatgaaagaaactaaatttgatggatacaacttaaaaccgtttattatagatgcagttcaccgccttggtttttatgaaccgacagatattcaaaagcgtctgatacctgccgtactgaaaaacgaaagcgtgatcgggcagtcccagacggggacggggaaaacccacgcctatttattgccaattttgaatcggattgatccgggttctgatacggtacaggctgttatcacggcgccgacgagagagcttgccaatcagattcatcaggaagcgctcaaaatcacacagggtgcggaagatgagccgatccggacaaaatgcttcatcggcgggacggacaagcaaaaatcaattgataagctgaaaacacagcctcatctcgtcgtcggaacgccgggccggatcgcggatctgattaaggcgcaggcattgaacgtctataaagcgcagtctctcgtcattgacgaagctgatctgatgcttgacatgggctttttagaagacgttgattacatcggatcgcgtatgccggaagaacttcagatgcttgtgttctcagctacgattccggaaaagctgaagccgtttttgaaaaagtatatggaaaatccgaagtacgcgcatgttgagccgaaaagaatcacagccgaaaagattgaacatgtgttggttccttctaaacagcgtgataaagacaaactgctttttgatatgatgtctcatctgaatccttatctgggcattgtgtttgcaaatacgaagaacacggctgaccatattgcgaaatacctgactgaaaagggcatgaggatcggtcttctgcacgggggattaacgccgcgtgagcgtaagaaggtaatgaagcagattaatgatctggaattcacttatgtcattgcgacagaccttgcggcaagaggaattgacattaaaggcgtaagccacgtcatcaactatgagcttccggacgatctggatttttatgttcaccgcgtcgggagaaccgcacgcgcgggttcatcaggccaggcactgaccatttatgagctttctgacgaagatgcgctcgtaagactcgaaaagatgggcattgtgtttgactatgcggagcttgtaaacggcgaatggaagaaaggcgatgaccgccaccgccgcaaaaaacgcaaaaaatccgagaatgaggccgaccaaatggcgaagcgcctcgtgaaaaaaccgaaaaaagtgaagccgggctataaaaagaaaatgggctacgaaatggaaaagataaaaagaaagcagagaagaaacaaatctaacaaaggaaagtaggggaatcgggttgctgaaaataggttcacacgtctcaatgagcggaaaacatatgctccttgccgcaagcaaggaagccgtttcgtacggggcgaatacatttatgatctatacgggcgctccccaaaacacgcgccgcaaaaaaattgaagacttgaatatcgaagcgggccgcgcccatatgaaggaaaacggcatcgacgagattgtcgtgcatgcgccgtacatcattaacatcggaaatacgacaaatccggcaacatttgagctgggcgttgattttctgcgttctgaaattgaaagaacggcagcgatcggcgcgagacagatcgtgcttcatccaggggcgcatgtcggagcgggggctgagacgggcatcaaaaaaatcattgaaggtttaaacgaagtgattgttcccgggcaaaacgtgcagattgcgctggagacaatggcgggcaaaggatcagaatgcggaagaagctttgaagagctggccgagatcattgcgggagtcacgcataatgaacatctatccgtctgctttgacacttgccacacccatgacgccgggtatgatgtcgctaatgattttgacggtgttcttaacgagtttgataaaatcgtcggcatcgatcggataaaagtccttcatgttaacgacagtaaaaatattaaaggcgcccggaaagaccgccatgaaaatatcgggttcggagagatcggttttgacgctctgcagtacatcgttcatcacgagcagcttgccgatattccgagaatcctcgaaacaccgtatgtaggcgaagacaagaaaaataagaagccgccgtaccgttttgaaatcgaaatgctgaaagaaaagcagtttgataaggagcttcttgaaaaaatatcagctcaataagaaagaaaggaggggcgggtgtccctcctttcttaccctgagaattgattgaaaagttcgtcaactttccgcgccgtttcttttgaagttatcgtttccacttttttcagcaggcgcagccgctcctgttcatcaaaaatattgatgttttttccgtgcatcagagccgctacctcagccgcttgacttcttgtaatgctgatcccgtattgcttggaatatttcagcagatcgtccgcagtgacttgattgagccgctgcaaaataattctttgtattaaaatcatcgatactttcacctctttagacataatgtattgagcagatcattaaaatgttacagcttttaatggtaaaataaagttgcttactgtttaaaatagttattataggaaaggagattttatgaccccaaataaacagcataaaagagaatcatttttacactttatcttcagggtcattatgattctgatcggggcgggttcagccgccgtaagtattgaattgtttctggtccctaataattttatcgacggaggcattatcggtgtttcattaattttagaccacctctttatgtccaatcccctcctcaattttgccttattcgttgtgttactcaacattccatttatgattttcggatataaatatatcggaaaaacatttctcatctctactgttatcggaatcgtcggtttagcgctgattgaatcctcattgcaccatgtggaggccattacgacccagcctattttggcgacggtattcggggggcttttgctcggtttcggggtaggccttgtcatccgaaacggaggctcgatggacggtactgaaatcctcggtatccttctcacgaaaaagctgcccttttcagtcggagaattcgttatgctcatcaatgtgtttattttcatttgggccggttttgtgttcggtccggagcaggcaatgtattctttcatgacttattatattgccatgaaaacgattgacgccgtcatccaggggcttgatgaaacaaaagcggtcattattgttgcagagcaatatgctgagatctcagatgctatattgcaccggcttggacggggaaccaccaagcttcagggaaaaggcggatatacggatgaaaccaaagaagtcatttacgcggtcgtgacaaggcttgaagtgactaaattgaaatccattgtgtttgaaattgataaaaacgcctttattacgatcatgaatacccatgaaacgaggggcggtaagttcaaaaccgcgattcactaggctttcatttacttttcatcattttataggtataatttgatacatcataagaaaatggcctgctgttcagacagctgccattttctttttggagcgataccgtgttgtaaaggggaggtcctcatgaacgtacaagaagcgttgaacctgctgaaagaaaaagggtataaatatacgagtaagcgagaagacatgctgcagctttttgctgattctgataaatatctgaccgccaaaaacgtgcttgccgtattaaatgacgactatccgggtctgagctttgataccatatacagaaatctttcgttatatgaagaactcggcattttggaaacgacggagctttccggagaaaaactgttccgttttacatgctcttatacccatcatcatcaccattttatctgtttaacctgcgggaaaacgaaggaaattgagtcctgtccgatggataagctgcacgatgatttggaagggtatgaaatcagcggccataagtttgaaatttacggcacctgtccggcgtgccgataaaaaacctcctgcttatacaggaggtttttttcagcttttaacatgctgaaagctgtgtttgtttttattaatccaggcgacggcttcaagccaattctgcaccctgataatattggaatcgatggggagctgattatatggggagttaaaaaggataaccggaatgcctgcttcttttgcgatcattgtcgcattgccgtggtgatcttcgaaaaataaatcaatgccgtgttttttgacggcttccactttgtgatggcctccgacaagctcaatgtgatcgtaatgaatgtcccggtttgcaaaccagtccagcgtaacatcttctaagtggccgcgtcttgccgtaatgtagatcaggcggtgctcttctttcagtccgtccagtgcctgcttggcaaattccgcgagctttgcttctttatatatggctgcttcatgaacgttcatccattcccaaaattcctcgtctgtaatgttcaaaagcttcgtcagatcataatcagtcatatcatccaaggtaatggaaagatgaaatgagcggtttaaataagggacaaatgtatcctgtgccgtaactgtgccgtcaatatctatacctaaccgtaacatgtccacactcctataaattcatcccttcaagtgtaacataaacaattaacaataccagaaaagtttagcaaacatgaatccgtaaaaaacgcggaaactaaaaaagctcctttcataaaagaaaaagggggaattgaaggtggcatacgattacgaaaatcgaaaaggcaacgactactacgtggatcatggatcggaaggaaccgatatcacgcgtgatgtttattcagaagaaacagcggccgaaatctcagagccatatcgtgcttctgaccgggcagcagaccgtgatgataatcgggacggagtaagtgaaggccgggggatagggtatgcagcattggctatttctatcatttccctgtttgtgctccctgttttattaggggcatgcggcattatcgtcggctatatcgccagaagaagaggagcaggcgctttaggcggatgggcgatgggaatcggtattgtttcccttgtgctcggcatcttcattacaccgtttttttaacacaacgcaaaaaaagcttggcggaatatccgtcaagctttttgtgtttcttgttctgcttttgctttttccgcttcaagctttgcgtagtgttcttctgccagcttgtcgatttcttttttcagctcttcgaccattgtttcttcagggactttgcggacgatttggcctttgcggaaaagaagtccttcgccgcgcgcgccggcaatcccgatatcagcttctcttgcttcgcccggtccgttaacggcacatccgagaacggctactttaatcggcgctttgactttagaaatgtattcttccacttcatttgcgatgcggatgagatcaatttcgatccgtccgcatgtcgggcatgaaataagcgtagccgcgtttgaagcaagaccgaatgatttcagcagttctctggctacttttacttcttcaaccgggtcggcgctcagagagatccggagcgtgtttccgattcctttgcttaaaatcgctccgagtccggccgcgctttttaccgttccggcaaacagcgtgcccgattctgtaattccgaggtggagcggataatcaaatgcttttgatgctttttcgtatgcttctatggctagattgacgtcagacgctttcatgctgacgatgatgtcgtgaaagtcaaggtcttccaggattttaatatgatgaagcgcactctcaaccattccgtcagcagtcggatagccgtatttttctaaaatgcgtttttccaaagaacccgcgtttacgccgatccggatcggaattcctttttctttcgctgcttttacgacggcttccactttttcgcggcggccgatgtttcccgggttgattctgattttgtcggccccgccctcaatagcttttaatgcaagcttgtagtcaaaatgaatatcgacaacgagagggatggaaatttgttttttgatgtcggcaatcgcgttagcggcgcgttcgtccggacatgccacccggacaatttggcagccggcttcggctaaacggttgatttccgcaactgttgcttctacgtcgtgtgttttggtcgtcgtcatactctgaatgacgacttcgttatttccgcctattgttaaaggtcccactttgacgggacgcgtttttgtacgatgtgtgatttcactcacttgtcaatcgctccttaattgtagttaccgcttttgcaggctgagccttttacatgtcaggcaacttctatttacatgttatattgtaacagtgtatttgccgaactgacaagaaattaacgtttaattgcggtagacggggaatttataagcggtgcctgcctgaatggcgtttgctcttacattcggattcagcgcttcaaaatcttgtacaatatcatcaggcgctttatgtgcgccgactatcgacatcaccgtatcgccttttttgaccgtaaccgttctgtatgaagtttcctgttgggctggctgtgccgccgctgcgtatgctggaaggtcttgagaagggatcgtgccgattttaagatcgtaaaagataatgaatatcacaaataaactgccgaatacaaaagtaagccgcttcattccaaccgcctcccgcatacatttttacttcattgtatgcttgtcccattttgttcatgacaaaaaagaagaccgccgggggcagtctttgttacacagctgtttttcttggcggtatctcttttaagacgaggaaaaggatgataaagtttacaaaccaattcactaaaaattcactcggcaccgtaataacaagcgcgcgcatgatcgtaaagaatatggtcgaaagtgtaatggaataagccgaaagcttccagagctgctggtaattcaatgtctttctttgcgcatttttcaatatgaggccgatgacggcgagaaatgatacttcaatgaattttccggccgctgtcatgatgaacagcagaacggacaggacggtgacgatcattgttttattttggtttaatgctgatatgatttctttttttgtgatatcagcaggcatcagcgaataattcatttctgtcgcctgtccgtctacagcaagcaccattttatttttcaaaatgccgatcgcattttgtttcgccgctatttgtttagcgccgtaagcatctgtcggatcaaacacgataacgaacccgttcgcttccgtttccttagaggcggacgctttcgtctgcaattctccgtttgaaatgctgaaatcagggaaatctttctttaacacggttttgaaaccgttcattgagtttacggtgccggagcaaaggtaataagcgcttggcagcgtaaaaaggacagacagcaaaaatacataaaggatcgcttttcctatcccctgaaaccgtgtttttgcaatatctgccggagagtatgtacttttcaataaagccgtaaatatgttcaacatcttcacttcctagcctaaactggtatatgttgcttattgtatcgttcacaggggatgaacacaagtgagagtatttaaagcggtgataaggaatcatacataataagataaagcgggaagcggtgatcgcccgcaaaacaaaggagggtgtttttgtcatgagtgttttgtattggctgatgatcattgcggtcttcgtcattgcttttatcgggcttgtatatccggtgattccaagcgttatttttattgtggccggttttcttctctacggatttttgttttccttcagtccttattcttacctgttttggctcattgaggcggtatttgcggccgttttattcgcagctgactatgtgtcaaatttacttggcgttaaaaggtacggaggaagcagggcggcaatctggggaagcacgatcggattattgatcgggcccttcgttattcccgtggcaggcattatattaggcccgtttatcggtgctctctgcgctgaggtgtttgttcatcaaaaggatatcaagtccgcggcaaaagtggggctcggctcgttaatcggctttttaacaagcgtggcggcaaaaggcgtcattcagctctttatgatcgggtatttcttatggacggtgctttagaaaggtttaatttcggccgtgaacggataaagtgtaatatgtctgctggaatcgccggattgtgagctttttcattgattaccacgctttcttttgttacattgagattagaaaagttcgcgttaagcggcatttcagtacatatatttaaaggaggaaaaaattatggcttacaaacttccagaattgccttacgcttatgatgctttagaacctcatatcgataaggaaacgatgacgattcaccatacgaagcaccataacacatacgtgacaaacctcaacaaagcgatcgaaggatctgcgcttgcagagaaatctgtagatgagcttgttgctgatttgaacgcagtgccggaggacatccgcacggcagtccgcaacaatggcggcggacatgcaaaccactctttattctggactcttttatctccgaacggcggaggcgaaccgactggtgagcttgctgaagagatcaaaagcacgttcggaagcttcgatcaatttaaagaaaaattcgccgcagcagctgcaggccgtttcggttcaggctgggcttggctcgttgtaaacaacggcaaacttgaaattacaagcacgccaaaccaagattcaccgctttcagaaggtaaaacacctgttctcggtcttgatgtttgggagcacgcgtactacctgaactaccaaaaccgccgtcctgattacatttcagctttctggaatgttgtgaactgggatgaagttgcccgtctttacagcgaagcaaaataattgagttgaatcatcacaaggtctcccgcgggaggccttgtttttttattgactttgattccttttacatatctcagtttgagtgagacaaactaatgtgtagtaaaggggagtcaatgatgagcaaaataaaaaaaattatcggcgacatcgaaataaataaagggctgctgctgttattgacgattggcggcctttactcattgggcatcgcgctgtcaaatacatttgtcaacgtgtatttgtggaagcagtcgggaaaatttattgatttggccatatacaatttgtcggtcgtaacgatgcagccggttacctttctgctggcgggccggctggctaaaaaaattgacagggtgtttattctaaggttcggcgttatctttttggccgctttttatttaagtgtgctgcttgccggagaaactgcggcttcccgtctcgttttgataggggccgtgctcggagttggatacggcttttactggctggcttttaatgtgctgactttcgaaatcacggaaccggaaacgagagatttttttaacgggtttttaggcattttgtcttcatcggcgggcatgatcggtccgattgtggccggatatgtcatttcaagacttgaaaacaatacgggttatacaatcattttcagcctgtcgctcggcttatttgcccttgccgtggtcatgagcttttttctgaagcggagggagtcgaaaggccggtttatgctgaaaaaagtttttgatgagcgccacacgaatctgaattggcgccggatcaccaacgcgcacttttttcaaggcttgagagaagggatttttgtttttttaatcagcgtatttgtattcattgcgacaaacagtgagctggcgctcggaacattcggtctcgtcaattccgcggtttctttttttgcctattattttgcatcaaggctcatcaaaaaaagagcgcggaaaaaggcgattcttatcggcggattgatcttgtacggcgccctgtttctcatcatttttaaaatgagcttcacgacgctccttttgtacggagtgtttattgcgatcggctatccagttctgctcgtgccgtatgtctcgcttacatatgatgtgataggccgggcgcggcttgccagaaaagccagaattgaatacattgtgctcagggagttatttttaaatgcgggccggatcgtttccatcctttgtttccttgtaatcgttacattgttcaaggaaaaagtgggaataccggcggcgctcgtgctgctcggagccgggcatccgctgatttattactttataaaagacatcaaactggatacggaaacttctgatgaaacagtagaagaagaccgacaaaaacaggcggcggaaccgaattttataaaaggagaaagataaaagggttatctgtagaaaaatatcgaaaaaacctttagaatgaaaaatggcacctgaacagaaggtgtcatttctttctgtaaataagaaaaggtgatgtcatgaggagaaataaaaagaaaatagctgtaaacaaagaaaagaaaaaatcactgccgatccggcttaattttttgtttttggccgcgtttcttattttcacttggattatcgtcgagcttggcatcaagcagatcgttcagggtgatgattataaaaacgccgctaataagcaggaggagtctgatgtcagcacggcggttccgagagggaaaatatacgaccggaacctaaatcccatcgtaacgaataaagcattaaatgcgattacatatacacgttcagcctcaaccacccaggcgcagcgtttaaaaatcgcaaaaaaactgtcgggtatgattaaggtaagcaccaaaaaggtgactgagcgggataaaaaagactattggatgttaaccaggcctgatgaagcgaaaaaactgattacggccgaagaaaagcaaaaagctgaagacaaaaaactgtctgaagatgatttatatcagcttcagctgaaacgcatcacagacaaacagctgaatgagctcacttcaaaagacatgcagatccttgcgatcaaaaggcagatggattcaggctactcactgacgcctcaatacatcaaaaatgaaggggtgtcggcaaaagaaatggccgtcgtcagcgaacatttggatgaactgccgggagttgacgtgacgtctgactgggaacggtcttatccaaataaagggttgttaaaatcagttctcggcagtgtctcgagctccaatgagggactcccttcaaatcttcttgagcattatttgtcactcggctacagcaggaatgacagagtaggaaaaagttatttagagtatcaatatgaaaatctgctgcagggccaaaaagagaaagtgagaaatgtgacagattcctctggaaacgtaacagatacagaaacggtttcaaaaggtaaagctggggatgatttagtgctcactatagataccgaattgcaaaaagacgttgaaaaaattattgagaaaaatttaagggctgcaaaggcaagaccgagtacacagttgcttgacagagcatttgtcgtaatgatggatccccgtaatggagaagtgcttacaatggcgggtaaacagattaaacaagcaggcggcaaatataaaattgatgattatgcactaggaacaatgacttcctcttataacatgggctcagctgtaaaaggggcaacattgttaacaggttatcaaacaggtgctattaaaatcggaaatatatttacggatgaagttttaaatattaaaggctcccctcctaaaaaatcggtaagtgtaatggggccgataaatgatttaactgcacttgagcgttcatctaacgtttatatgttcaaaactgcgattgcaattggtaagggtaaatatatatcaggacattcacttccgcttgattacagcgcatttgataaatttcgttattacttcagtgaattcggtttaggggtaaaaacaggaattgatctgcctaacgaagctacaggatatgtgggaactaaaagacagtcaggtttcttgcttgattttgcgatcggccaatatgacacatacactccgcttcaaatggctcagtatgtatcgaccattgctaatggcggctatcgtatgaagccccaagtcgtgaaagaagtaagaaaaccttcaaaaaaaggtatcggggccgtcgttgaatctgttaatccggaagtgatgaaccgtcttgatatgacggaaagtgaaattaaacgtgttcagcaaggttttaaacttgttatgaatggagctcaagggactgcgagagcaaattttgctaataaaagttatcacccagccggtaaaaccggaacagcacaagctttctatgatggacctataaaatcaagaactggtgcttctacttataacacaactttggtggcttatgctcctgcagatcatcctgaagttgctatttcggtagtggttccatgggcttatgaaaattacaatgacaggtattcaataactaatgacatcggggaagcagctctggacaaatactttgagctgaaaaagaaacaagaagataataatacgaagcagaaaaacgaagataaaattcaggaagacgctgaaaacggcaatacaaatcactaacagaaaaacgctcacaacctgtgagcgtttttttttatacaaaaaaacatccggatttacaaaaccttaacacttgatttatacgcattttacaagaaccctttactctagacctgtaggacaaattacacattaaatgcagggggaattcaggaaatgaaaaaaaacaaatggatgcttatgcttctgatggctgctgttatgattgttgctgcagcatgcggaaatgcaaaggaaagcggcaagacagacagtcaatctgcaagtgaggataaaaaagcatcaggttctttaaccatttctggttcatcagccatgcagccgttagtactggcagcggcggaaaagtttatggaaaaacatccggatgctgatgtgcaggtgcaagcggggggttcaggaacaggtctttcgcaagtgtctgaaggggcagtgcaaatcggcaactcagatgtctttgctgaagaaaaagaaggcattgatgcgaaagccctaaaagaccaccgagtagcggtagtggcgatggcggctgcggtcaaccccggtgcgggcgtaaaggatataaccaaaaaacagctgacagacgtctttacaggaaaaattaaaaactggaaagagcttggcggtaaagatcaaaaaattacactcgtgaaccgtcctgattcatcaggaacacgcgctacgttcgtcaaatacgcgcttgacggagcagatcctgctgagggcatcacagaggattcctccaatacagtcaaaaaaatcattgcggaaacgccgggagctatcggttatctggcattctcttatataaacgatgacaaagtaacgcctttatcgatcggaggcatcaaaccggaagagaaaaacgtcgtcacaggcgagtatccgatttgggcttacgagcactcttatacgaaaggtgaagcgtcaggccttacaaaaatgtttcttgactatatgaacagcgatgaagtacagaaaagtatcgtaaaagatcaaggctacattccgatctctgatatgaaagtcacacgtgacgcaaacggcaagcaaagctgaggggagggcgggctccccgcctcttcttctttataggagtgtaaacaaatgataaatcacagagaaaaagagtctgtaagcgaacgcttaataagctcaaaacaaaacaggcaaatggatgaagtccgcggaagggtgattgtgtctgtgtgtgccgcgattatcattgcggcatcagcggcgatcacaatttttctcggcataaaggggctgcaatctttttttgtaaatggtgtaagcccgattgagttcttaacaagtctgaattggaatccaacccaggcaaaacctgagttcggcgcgctgccttttattttcggatcatttgcggtcacggttctgtccgctctgatcgcagcccccctcggtattgcgggtgccgtgtttatgacggaaattgcgccgacttggggaaaaaaggtgctgcagccggtaattgagctgcttgtcggcattccgtccgtcgtttatggattcataggtcttacagtattggttccgtttatcggctcttttaaatcaagcggaacgggtcacagccttctggcggggacgattgtactttcggtgatgattctgccgactgttacatcgatttccgctgatgcgctagcatcacttccgaaacaccttcgcgacggttcatacgcgcttggtgcgacgaggtggcagacaatcagaaaggtgcttatcccggcggcgtttccgacattgctgaccgctgtcgtgctcgggatggcaagagcgttcggagaagcactagccgtacagatggttatcggaaatacaaagcttctgccggaaagcctgcttgatacggcgggaacattaacgacgattattacgttaaacatgggccataccacatacggcagtattgaaaataatacgttatggtctatggggcttgttcttctcatcatgtcgtttctgtttatattgctcatacgctacttgtcgtctaggaggaaagtgtaatgaaccggaaaataacggataaattggccaccggtgtattcgggttatgcgccgctgtaattgcggcgattttggcaggattgtttttgtacattcttattcacggcgtctctgaaatctccttgcattttcttacgtcaaaatcgagcgccattgcgtcaggcggcggaatacgggatcagctttttaactccttttacattctgtttatcaccatgctgatcacgataccgcttggagtggggggcggcgtctttatggctgaatatgcgccccaaaataaaatcactgattttatcagaacgtgtattgaggtgctgtcttcgcttccgtccattgtcatcgggatgttcggcatgctgatgtttgtaaacctgaccggatggggttacacgattatcgggggcgcgctcgcattaacggtctttaaccttcccgttatggtccgggtgacggaaggcgcgctcactgcagttcctaaggagctgaaagaagcttctctcgctttaggcgtatcgagatggcataccgtcaaaacggtgctgattccgagtgcgattccttcgattttaaccggtgccattctcgcatccggaagagtattcggagaagcggccgcattgttatttacagcgggactgacaacgccgcggctgaactttacggatttgaacccgttttctgaatcatctcctttcaacattttcaggccggctgagacgctggcggttcatatatggagtgtcaatacgcagggaatcatccctgacgccgaagcgattgcaaacggcggctcggcggtgctggtgatttcggtgctcttgtttaacctttgtgcaagatggctcggatctgtcatttataaaaagcttacggcaaattaatcggaaagaggcgaaaacatgattgatcacatcatcagggaacaagcggaacagacaaagcgttcgccggagtcttcaattttggaagtgaagcatttatcaatttattacggtgacaaacaagcggttaaagatgtaaacatggatattgaaaaacatgcggtgacggctctgatcggtccctccggctgcgggaaatcaacatttttgagacagattaacagaatgaacgatgccattccttttgcaagaagcgagggagagatcctttatgaagggctgaatattttgggggaagcgattaatgtcgtgtctctcagacgggagatcggtatggtgtttcaaaaaccgaatccgttcccgaaatccatttacaataacatcacacatgcgctgaagtatgcgggggaacgcaggaaagccgttttggatgatgcggtcgaggaaagcttaacgaaggcggcgctttgggatgaagtcaaagaccggcttcattcatcggctctttcgttatcaggcggccagcagcagcgtctttgtatcgcccgtacgcttgcgatgaaacctgccgtgctacttttagatgaaccggcctcagctctggaccctatttcaaacgccagaatcgagacgcttttgacagaactgaaaaaagattattcgattattatcgttacgcataacatgcagcaggcacttagggtgtctgaccgaacggctttctttttaaacggggaagtggtggaatacgggcagacagaacaaattttcacgagtcctaaagcgcaaaagacagatgactacattaacggaaagttcggatagggggaaggactgtgagccttgtgaaggaagcggtgcacacacagaatttatttgatattcacggcatgaacgtatggtacggagcccatcaggctttaaaggacattacgatcggttttgaggagcggaaggtaactgcgatcatcggtccgtccggctgcgggaaatccacttttattaaaacattaaacttaatgctgcaaatggccccgaatgtcaaagtgacaggcgacatgatctataacggacgcaatctgctgaaagaaaagacggatgcggcagaattaagaaaacagatcggtatggtgtttcaaaaaggcaatccgtttccccagtcaatatttgagaatgtcgtgtacggtccgagaattcacggcgaaaaaaataaaaagaaactgcttgaaatcgccgaggaatctttaaaggcagctgcgctctgggatgaagtgaaagatcgccttcaccagcaggcgctttcactgtcaggcggtcagcagcagcggctgtgcatcgcaagggcgctctccacaaaaccggacgtccttctgatggatgaaccgacgtccgctctcgaccccgtatccacgaggaaaatagaagagctgattttgacattgaaagaaaagtatacaatcgtcattgtgacgcacaacatgcagcaggctgcgagggtctctgatcaaaccgcgtttttctatatgggcgaactggtagaatggggggatacgggcaaaatattttctcagccggatcatcaaaaaacacatgattatatcaccggaaaattcggatgaaaaaaacgggcccggccattgaccgggtccgttttatactccttattaaaaaagcctgccggccgtatccatctgaatggacgatgcctgcaagcttttttagcgggttaatgttttgacgatttttttaaagctcatatctgagtcgactttgaaatggccggcgcggatttctttatggtagcctgcgtcaatgacgtaatcattaaagtccttcgctgaaggaataatcccttctttttcaagaatggatgacacatcagcagtgctcattccgtctttaatcgtcagtttgtatgttacttttttctttttggcgtctgtgttttggtcgttgtttaacgatttttctttagaatcaagcagtttttgatagtcatcccggttgacggagactttttgctgatcgtcgaggtagctgtttacttctttttctgtcaatgctgttttttcggttttaacggcggctgcctggtcatggtcagtcaaatagaagacagcggcgagaacggccgtcgctaaaatcatgcctgctgcaaaagcctgaatgccccgttttgtcatacgagcaccttctcattatctttaataatggtattgacgtcctcgacagacacgtgctccgcttttgcgatggcttccgcagacattccgttgttatattttgaaatgatttgtttggcgattttttggttaatgccgctgcttttggctttgcggatcacgaggttggtttccagcaattcttcttcaagcaccgtcattttctttttcagcttgtaaatttcctgcatggcggaaagctgaagcgtttcaagctcctgttccacgtctttcatcggatctctttgagaatatgagaatgcaataagcgctatactgacgataaacaacgcaataatagcaatttccacgtttcatcaccttctattattaatttgcccttcttttttataccataaaacgccgccattctaaaggaaatagagaaaaaaacggaattttgtcgggaaatcttttttattcggggagcaaacggttatttctctatagatttcgcatcagaaagtccttttttgtcctgtttcgtcatattttcccttcaccaggcgcaagctcattcagaggatcagaagcataaactgatgttttctgcacttaaacaacatttcatgtaaatcactctagcattccgtccattatagtggtattatatataagtctgaataagtaaatgatatttagtttggagggaaaataatgcgcgttaatattactttggcttgcactgaatgtggtgagcgtaactatatttctaaaaagaacaaacgcaacaatccggaccgcgttgaatttaaaaaatattgcccacgtgataaaaaatctacgttacaccgtgaaacaaaataagctgtttaaaacagcggaaaaagctggagctttcaataaagttctggcttttttgtctttcagggaggtttgagaaacgtgaaagcacaaatcagaaccgctatcaaagcaaagctttctgacatgacagaaagtgaatgggaggcaaaatgccgcagcatgcgtgaaacgctgttttctttaaaagaatggaaacaggcccgcgtgatcgccgttaccatctcgacacgcctggaaattccgacacggccgattattgaacaggcctggaaagagaaaaaacaagtctgtatcccaaaatgctttccgcggacgggagcgatggagttccgtacattttctgcgtatgatcagctggaaaccgtatatgcgggcctcagtgaaccgatcgagagccagacggaaaaagccgcccaaaaagacattgaccttgtgattgtgcccggtgtggcttttgaccgggaaggcttcagaatcggatacggcggaggatattatgatcggtacctctccggttataaaggccgtaccgtgtcgcttctctttgactgccagctgacagaccgcattccccgcatgccccacgatattccggtcgataagatcgtgactgaatctgaaaccatcgcttaatcgcataaaaaacttcttgcaccggaataattctcgctgtttgacaaacgataggggcaggagggataagatgaaaaaattgttgatctactcattatgcgccgtatctgttttagccgtttaccaaaaccgctaccgtctgatgaacagcgtgctcagccagccggggatcagacggtcattcattcatttctttttaaaaataccgtttatcagaaacaaattcattcagcaggcattttaaacaaatcccgtttttcagcgggattttttgcataagaaaacctgccggtaaaaaacggcaggttttctcgtattgtcagctttttttcaggaaaccgagcagaattgagatcataggagaaatgtacaggaaaaaggtaaacggcaggtagtcgatgacgggaacccctaatgcgcttgccataaaagcgccgcttactccccagggaatcagcgggttgatcaatgttccgccgtcctcaagcgaccgcgcaaggtgaatccgcttaatgctgagcttgtcatataaaggtttataagattgacccggaattaagatcgacaaatactgctcacctgtcgcaaggtttacgcctatacttgagaagacggtcgccatgacaagacgtcctttcgtatgcacgccttttatcaatccttgaagcagcgccgcgatcaggcccgttttttccatcaggccgccgagcgcaaaggcgatcatgatcagagagactgatcccatcatcgattggagcccgcctctgttgataatgctggccacagcctggtcgccggttttaaacgccgtcccgctttgcagggcggatataaatccttgaatgctgctgtcaggaataaaaacagcagtcagaagccctgcggaaataataccggcggtaagcaccggaatcacggaaacccgtctcacagctaaaatgatcaccaacagaggtgaaagaagcgaccaaggcgtaacgtgcacagcctcttttattccggaaatgaccgcctcaatattttgcgttgaagcggcatttattgaaaccgatgaaccgagaatataaaaaagaacaatcgtgatcagcagtgccggaacggtagtgcccatcatatggcgaatatgcttaaaaatcggaatttcgccgattccggcggcaaaattcgtcgtgtcggacatcggtgacattttatcaccgaaacaagccccgcaaatgactgctcccgccgtccattcgagcggaactcccgccgcgcttgctacccctaacagcgcgacgccgattgtactgacagttgtcagacttgagccgacaagcgtgctgataatcatgcaggaaaataatgcggtcaaaagcagctgactcggctgtataattgacaaagcgtaaacggtgacggtgggaatggcgccgctgtacatccaggcgccgatcagcataccgatcaaagccagtacgataatcggctgcacaccgtttttcaatccgctgacaattcctttttcaagactctcccacgagaaaccgagccacaaacctgccagagacagaataatgacgcaaaagaacagcggcatatgcggctctgtatgaaagaaaaacaggcaggacataatgactgctaacatcaagacaaataaactgatggctgagatgaacgtcagccttttttcttgtttcaaaacaacaccccatcaaactttaatccttttgtgcttttgggcacgaaagtattgtaacagaaaaacgcataaatgagtgtttttttacaattgcgaatatacaatttatgaaaataatacaaggatattttctccaatcgttttttgcttgacgcccggatcagtgatgaaatacgcttatactaagaagaatagaaatggtgaagaagatgaattcattttatgacgtgcagcagctgtttaagtcattcggacatatcgtttatttcggtgacagacaagccgaaattgactttatgaaagatgaattaaaggaaatgtacttgtcaaacgtgattgaaagagaattatggcaaaaagccgccggagttcttcagagagaatcggagcggatcaaaggcagataacacagcaggattttaataagaaaaggagattattatggaagatacatggtttgcggggattgatcttggcggaacaaccatcaagctggcctttatcaacatgtacggtgaaattcagcataaatgggaagttccgaccgataaatcaggaaacacaattacggtcacgatcgccaaagcgcttgaccagaagctggaagaactgaacaagccgaaacggatcgtaaaatggatcggaatgggagcgcccggacccgtggaaatgacgacggggatggtctatgagacgacaaatatggggtggaaaaactatccgctgaaagaccatctcgaggcggaaacgggtattccggccgtcattgaaaacgatgccaatatcgcagcgctcggagaaatgtggaagggtgcaggtgacggggctaaagatgtcattttagtgacgctcggaaccggagtcggcggaggcatcatcgtcaacggagaaatcgttcacggcaaaaacggggccggcggagaaatcggtcatatttgcagtattccggaaggaggagctccgtgcaactgcggaaaatccggctgcatcgaaacgattgcgtccgcaaccggcatcgtccgcatcgcgaaagaaaagcttgcggcggtttccgactcttcgctcttacaagtgcgcgatctgacagcacgtgacgtgttcgaagcggctaaacagcaggataagacagcgcttgaagtcgtcgattatgtcgcaaaacatttaggcctcgtgctcggaaatctggcaagcgccatgaatccgacgaaaatcgtgctcggcggaggcgtctccaaagcgggtgaaatcctgcggtcaaaagtggaagagactttcaaaatcaccgcgttcccgcgttctgcggaagcggccgatatttcgattgcggcacttggaaatgacgccggagtcatcggcggggcgtggattgccaaaaatgaatggctcaaacatcaaaactgctgaagaaagtcagcctgcccatatcgcgggcggctttctttttttatctccccagtcatatagtttttaaaaaagggggatgaacatggcgggaattcgtgtcaaacctgatttgaaacagcatatgaaagatattgcaaaggtgctttcaattgatgaaaaactgttgaaagccgctgataaaacggcggaaaacgatgaattattttgtcccggctttgccgtgagcgggcagtcagagggtccgccgcttgagacgctgagcgggctttcgcgatacatccggcactgtgaaaggattctttccgctgatcaatgggtgaaggaagaaaaggtgtacggctccgaatcggtttatgaagaaattgagaaaataacggatgtctttccgtttgtcacgtgccgtaaaatcggcagttccgtattgggaaagccgctttatgagctgaaaataggtgcggatacggctgaaagaaaagtccatgtaaacgcctcatttcatgccaatgaatggatcaccacctcggtcgcgcttaaatggtgtaaagaatattgcgcggcattatgcgaaaataaaaccgttttcgggcactctgcgcttgatatattcagcctgacatcattgtcattcgttccgctcgtaaatcccgacggtgttgatctcgtactttacggatgtgaagatttatcagaaaaaaatgaatttcttaatcgattaaatgaacaccgcccggatttccgcgaatggaaggcaaatataaacggtgtggatttaaataaacatttcccatccaattgggatattgaacagaggcgcaaaccgaaagccccttcatatcgtgattttccggggacggcgccgctcactgaaccggaggcgcaggcgatgcaccggctgataacggagcagccgcctgacaggctgatcgcgcttcatacgcagggagaagagatttattggggatacgaaggatgtgaaccggagcaatcatcccggatgattcgggagtttgaagcgataagcggaaaccgctatcaaggcgttaaaaccattgacagccatgccggttttagggattggtttatacagcagtatggaaaagagggctataccattgagctcggaaagggaaaaaaccctttgccttttcatcagtttgctgatatttatcaagcgacggaaggtattttgtggaggtcgcttgttttttgagacatctgtgaaatttctcatttgtttacataaacaaatatgggacaatagaaaagaatggagggaaggctggtgagatacttggtttgtgttctgctgtccgcattcgttctgtgtttagcggcctgtgaaccatctcatcagcagcaagacacaggcgtttcggcaaaatcggcagaacagaaaatcgttccgctcagtaaaaaggaagcggagaaaacggaaggatggctggataacagaacgattctgtatacagcacatcatcagctgatgaaatatgatcttttcagcggaaaatccgaacggctctatgaaacaaagggcaatattgtcaatgtaaagatcagccggaaaaaacagctgattctcgtacaggtgacaagcagcggtcagactgagcttgtgcttatgaacaagcaggggaaaagactttatcacaaagcctttaactcttatgagctggagacggcttggaatccgtatgacccgtatcaaatgatgattaccgtttttactgaaacatgggacttcactgcctatacggccgatatgaacaatggcattttaaaaaagagtcccgttcaggccccttttgtccattggacctccactgatgaattccaatatatcaagcaaggaaaaacggaggaagagggtcctttatattcttatgacttgcagacgaaaaaagaaaaaagagtgcttcatcacgtcatctgggccgattcccgcccgggcatgacgattgccgtcagacaaacggatcaatcggacggagacggcgagttccttttccaaaagccggcatccgtgacgcaccgctttcctctccaaaaaaagtatgagagctttgcgccgatggagtatgattacgatcagacacacaagcggttttacatattcaagcctgaaggccgctcttacaatctgatcagctttgacttaggagacgaacgggagcggacggtgctcaaaaacacggaaatggagccgattcagatctctccgaacggggaatacgctttatacggctttacgtatgaccgtctgatttcactgaaaacaggcatgacagaaccaatcataacaaatgaaaaaggagtttgaaccaaatggcaattgcagatgtgacaatcattccgatcggaacaaaaacaccgagcgtcagtgagtacgtagcggatgtgcaaaacattttggagggttacaaagctgccggcaaaatcaaatttcagctcacgccgatgaacactttgattgaaggtgagctgagcgacttattcgcagtcattcaggacattcacgaagccccgttccaaaaagggctgcacagagtggcgacaaatatccgcattgatgacaggcgtgataaagaaacgacactggagagcaaaatcaaaagtgtcagcaaacatttgcagcaataaaaaataggcctgtatccattggatacaggcttttaatgtgcagtcggatagccgctggttacaacggtcattacggtaaaccagccaaacacgcccagcgtggcggcggctaacaaaaatcccaggatatttctctgtctgacagcccgcaggactcctaatacagctaataatgcgacaaggccgaagattacaacaagtaacatcatgctcctcctttgtcattggaacctgaaaatctttccatttcattttaaccgttttcattttgtttgtcgatagcgttttcccggccgcattcattgaatcttccgcagaaaaccttcataataagggcatatacataaagaggtgatgaaagtgaaatggagacgaatgccggccggtccgattcaggcaaacgcgtattttcttgtcagtgaggatcagtcctgtcttatttttgatccgggcggagaagcggacaaaatcaacaattacataaaagaaaacaatctgaagccgctggccatcttactgacgcacgcccattttgaccatatcggcgcgcttgacgaagtaagagacagatgggatgttcccgtatatcttcacaaaaatgaagaaaagtggctggaggactcttccttaaacggatcaggcatattgcggggcatcgccgtaacggcacggcccgccgaacggctgattgaaggcgacggcatattggacatcgggcctttccatttggagacattgtttacgccgggacattcaccgggaagcgtttcttattatgtgaaggacgcggatctggtgatttcaggtgatgtgctctttcagggaggcatcggccgaactgatttacacggcggaagtcaggacgtattgcttgattccattcatcaaaaactgctcacgcttcccggacatacacttgtgttaagcgggcacgggccggaaacggatattcagacagagcaggagcgaaacccgtttatcaatggtttttcactgtaaatgaaaaaagacagaccataatcggtctgtctttttctgtcagtgggttccgccgcccggtgtcataataaaaatagagtaatatgtaaatccggcgaaaaatacggttaagtaagctccgaaaatataaatatacatccgctcagtcagattcaaataagaaagaaatacgaaaaagatcgtctgtccaaaaaacaaaagtgaagcgtctttcatgccccctaaaaaaaacatgactgcaaatatccccgtccaaaatcctaacacccggaacatgcgattcattccttatcccctcccgagagtctatctgaagtttattataatagatcggcactcaaaatgtaaacattttcatgattatatttattgtggaatttatgtctttccctgtgttttatatcttatgccgctctctgaaaaagatccgaaaaatctttttgaaatatgtttaatgaaaaaaagttcagggtacttatgttaacaaagagacggattatccgagggaggaatttttaaaaatgaaagaacttattttttattcatacccgagctgcacatcatgccgaaaaacgaaacattggttaaaagcccacaatgttgactttcaagagcgccatctattcagggagacaccgacaattgatgaattgaagcagatcttatcattaacgactgaaggaattgatgaaatattggcgacgagaagtcaaacatttaaaaatctcaacctgaacattgaagaaatgactgtaaatgaagtgctgaagcttttgactgagaagccgaaactgctgcggcgtccgattctgatcgatcgcaataagctcgttatcggatacaatccgggagaactgatgaagctgacgaagaaaaaaacggtacatcaatctgtatcataagagaaaaacgaagatccgctgatcaaaatttatcagctaatcttcgttttttgcggttgcgggactgggctagctggattcgaaccaacgatcacggagtcaaagtccattgccttaccgcttggctatagcccatcggatgtaattacagtatgtgcgtccggcgccgatttatacatacaaaggaatttgaatggaggagacccgtgaaaaatttgagtgaagcattatctcgaaccttaattgaagaatcaggtgaaatcacacgccagtggctgctcataccaaaatcggggcggcctacagatgatcagaaagcggaaatgcagcaccgtctgttaattgaaatcgttgccggcattttatcggaaaaagacggcggggaagaggagctgacgaaatgggcgcttcagttcgcaagggaccgggccgtccatgaagtaccggtctatgaaagcgtcacgagctttaaagaattccggagattggtctggaaccgcatacagacgtgctgtgaaacaatgtctgagaagcctggggcgaatgcggtattccattggggagagaagctgaacaaagcaattgaccatatgattgaagtatttacagaggaatattataaagtgacggttacacaattaaacgcccaaaaagaaatgattaacgaactaagcgcgccgattatgccgattgccgacggtattggaattttgccgctcgtcggcgaaattgacacctaccgggcaaaaatgattttggaatcggtgcttgaccaatgttcttcactccgtctttcttatttatttttagatatatcaggtgtgccgattgtggatacgatggtcgcttatcagatttttaaagtgattgacagcacaaaacttcttggcatagaaacgacaatctcaggcatcaggccggaaatcgcgcagaccgtcgtgaagctcggcatcgatttttctcaggtgaaaacggagcagagtctggcgaaagcgctggcaaaaaacggatttatcgtaaaagaatcattaagatgataaaaagctgaatggccgggagggatgtctccctcagctattcagctttttcagcttcaatcgtaatgatatgatggctgtcgatttcttttaccgtaaatgtgtagccttcaaaatcaatggtgctcccgggcttcgcgtcaatatgctgagtaagaaaccagcccccgagtgtatcgacttgatcagccgtaatctctgttccgagtacatcattgacgtcactgatcagcaatttggcgttcaggagatagcggttcttcccaagcttttgaacagaaggtgtttcgtccgtatcaaattcgtcgcggatttcgccgacaatctcttcaatgatatcttccgccgttactaatcccgcggttccgccgtactcatcaatgagaatggccatatgggcgtgttcccgctgcattttaacgaataattgataaatcggaatcgtctcaatcacatggatcgccggctggatgtaagggctgagttcgtgttttgtaaacgccgctccttctgacaggaatctgaataaaacttcttttatattgatgatgccgactacatgatctttatctccttttactacgggataccgggtatatttatttgttttgataatgtcccggagcatatgtcccgatccgctgtctaacggcagactcaccatttcattccggggcaccataatttctttggcagtgcgcttatcaaatgtaaaaatgttatttacgtaatgcagctcgctttttttaatcatgccgcttcgatagctttcggcaaggagcacccgcaattcctcttccgtataagccatttcatgttcggaagcaggcttcaagccgaacatggctgtaatcaggcgggcggaatgattgagcagccagatgaacggaaacattaacttataaaacaaaatcatcggtctggcagacaaaagtgtaatccgctcggctttttggatagcaaaacttttcggggcgagttcgccgataacgacattcacatatgtaaccagcagaaaagcgatgatcaatgacaggacttgggcaaccgcttcgtgaactccggtctttaaaaataacggctgaagcatcgctttgactgtcggttcacccagccagccgattcccaaagcggtgacggtgatgcccaattggcatgccgataaatattcatcgaggtgtgtaatgacatgcttggctgcttttgctccttttacatcttcctcaatgagctgattaatgcgggagcgccttgctttaacgattgaaaactctatggcgacaaaacacgccgttaataaaataaatagtacgatggcagacagtttgatgatatacaatgtaacgccttccgcgaaggaaggcttgcacctcccttttttcggaataataccactgtagaaagctgctcaaacatcgaacctggtttagcctgcttcatttacggtaataaaacaagaaagcgatactggaggatgacaagagatgaaggtacattcgggagcggactggctgtggtaccagctcggtccgcatgaaaaaacagaagcgaaaaaaatgatccatcacaatcactggccgcaatgcgaaaagtggtttgaacatgaaaatcatataaactttctgcgctcagatacaaatgatcagaataatgaagcggttttcggttctttaatctatcatcaaggattagatgatgaaaaaaaccataccgtatttcacttttatattacgagagacttcttttttacaattaattttgatttttcgctgctgcgcggtgtaaaagaaaagcatgccacacagcagattcaaacctgtgaaaatccgattgaaggcttttttgttctgctgggagagctgatgaattcctatctgatcggactggatgaatttgaagtcaagcagcggacgctgaaatggcagattcatgatgacaacagcaaaggaatcttggaaaatgtgcataaactgcgccatgagctgttcatttggaaaggccttacactgggggctcaaaaagtggaaatggctttaaaagaagcttttctcccgaaaaatgacaggcagaaagattacctcagagctcaccaaaagatggaaagaggaattacatatatcaatgagtttgatcaggaactgagcaatctgctgcacgccgaggaagtcattacctcccaaagaggaaatgaaattgtgaaagccttgacgatctttacaactctctttacaccgatgacggcgcttggagctctctgggggatgaactttgataacatgccggagcttcattggaaatatgcgtatatttgttccatcgtgctcattattgtatcaaccctgctgatttatatttatctgcggcagaaaggctggacaggggacattttgagggagcatcaaaaaaaatatttgcggaaagaaaagaaacgctaagaagagcaggcatacgcctgctttttttgatggctgaaaatggccgaatggttccggatttcattcggtaaatcaatgtcaggtggcttattttttatttttttacgttttacacactgtaaaacgcataatctctcctttgccggcttttgtgtatctgatttacaatacgtgcggaaggagggaagtcttgtgaaaaatattgaaacatatagcaggaacatcataaacgaggcctatacggcaagggcttcagatatacacattgtgccgagagaaaaggatgctttcattcattttcgcatcggctatgctcttgtgaaaaaaagagtcttaaaaaaagaggaatgcgtaaggcttatttctcattttaagtttttatcggccatggatataggagaaagacgtaagccgcaaaacgggtcattgtctctgccgcttccgacggaaaccgttcatttgagaatgtcaaccttgccgacaatgaatgatgaaagtcttgtcatcaggcttttgcctaagcggcagattccccctctggataaactgtccttatttcggggggcgggcgccgcactattgtcctttctgaagcattcgcacggcctgcttctgtttaccggccccaccggatctggaaaaacgaccactctttactcgcttgtcaactatgcaaaaaggcatttcaaccggcggattgtcacgcttgaagaccccgtagaaacaagagatgaggatgtgctgcaagttcaggtgaatgaaaaagccggagtcacatattccgccggtttaaaagcgattttaagacatgatcccgatatgatcattttaggggaaatcagagatgccgagacggctgaaatcgcagtccgcgcggccatgacgggacacctcgttctttcaagcctgcatacaagagatgctaagggcgccatatacaggctgctggagttcggcgtgaacatgacagaaattgaacaaaccgtcattgctattgccgctcagcgtctggttgatttaacatgtccgttctgcaaagaggaaaactgttccgtgtactgccggatgtacaggcagacacgccgtgcgggcatttatgaactgctctacgggaaaaacctcacccaatgctttcaggaagcaaagggagagcacgccaattttcaatatcagacgctccgcaggctgatcagaaaaggaatcgcgctcggctatgtcacgaccgacaattacgatcggtgggtgtatcatgaagcggattaaacgaacatggccgttgaaggatcaagcggcttttttgaaaaggctcggtggaatgacggaaaaaggatacagcctgattgaagggctcagactgctgcaactccagctgcataaacgtcagcttgcagagctgaaggaaggaatccgccggctgagagaaggtgatgcgttttaccaagtgcttgaggcactgtcttttcataaagaagccgtctctatctgctatttcgcggagaaacacggggaattgccgggggcgatgaaacaaagcggcgaattattacagagaaagctcatgcagacgaatcaaatcaaaaaaatgctccggtatccgatgtttttaattttttccgtctgtgtcatgttttatatcctgcaaagtttaattattccgcagttttctgggatttatcaatcaatgaatatgaatacgtccggtgcgactgctttcatctttgcattttttcggcattttcatgaagcctgcgcactggcgctttccgccgctttctgcttgtttttgtacgtttggttcttatgtaagaaaaaatccccgcaagataaaatgctgattgttgtgaaaataccactattaggaaaagcggccgttctttttaacagctactttttctctttacagctcagcagtcttctgaaatccggcctttcgatctatgacagcttaacagcttttaaagagcaatcttttctgcctttttatcgtgaagaagcagagatgctcattacacgtctgaaagccggagaaaccatagaatccgctctttccgggcatccgtgttatgaaaaagaccttgcggctgcagtcagccacggacaggcaaacggcctgcttcaccgcgaactttatacgtacagccagtttatgatggagcgtcttgaacaaaacgcggcgaagtataccggcattctccagcctgtcatttacggtgttgtggccggtatgattttaattgtctacatgtcaatgctgatgccgatgtaccagatgatgaaccaaatgtaagggagtgcttcgtctgaaaaatcaagatggatttactttaattgaaatgctgattgttttatttatcgtttccattctgcttttaatcaccattcctaacgttacaaaacataatcaaagcattcagcataaaggctgtgaaggactgcagattatggtgaaagcccaagtgacggcgtacgaaatcgaccatgaaggtaaaatgccggatatgaacgatttacaatcagaggggtatatcaaaaagaatacagtctgcccgaatggtaaacagatcttaattagtggcggagaagttacagttgaacaataacaggcggacagaaaatgggtttacccttcttgaaagcctgattgtgttaagtctggcgtccgtcctgctgacggttttgttcacgacggttccgccggcctacacccaccttgccgtgcggcaaaaaacagaacagctccaaaaagatattcagcttgctcaggaaacggctatcgcagaacataaaagaacaaaaatcacttttcttccaaaagagcataaatacaaactgcagtcaggcggaaggattgtcgagcgttcctttgattcgcttcacattacacttgtgactttaccggagagccttgaatttaacgaaaaaggccatccgaattcgggaggaaagatccaattgaagagcgccgggttcacctatgagatcacagtttacttagggagcggaaatgtccatgctaaacggaaataaggggttctctactattgaaacactatcagcaatggccatttggctgttccttatgacgtctatcattccggtctggacgggcatgctgacagatggtctgaaaatagaagatcgccaggaagcgtaccagcttcttcagaaacatatcagcacttatatgatgaccggaaaaaagccgccgtctcccggtgtgaagtggaaggaggatggtgagtattacaaagtgtgtacggctgaccgcagcgaaaaagaaatgtgcctcagcattctcaaaacagactggctttacgcttcttaatgttttgttctccttggcagtctgtcttttcctatcaggcaccttgggcccgattttacatctgtttttatcaaaccggaccgataacggcggattagacagccgggagcatcaaattgccgttcagcagatcatgaacgaatgtaaacaggctgaggctgtggagccggcggacggcggacgggcgttagcatgccggaaaaccggaggcgaagaagtgcgttttgaaatttatcataagatgataaggaaaagagtaaacggaaaaggccacgtgccgatcctgcaaaacgcggcatcattaacggctgatgtgaaaaacggcctgctcttattagagatctcaagcgttgcaggtcaaaagaatcaggcggtcattccggtttacagcttttttaaaggtgattaaatgtacaaatctgacggttttatatatcccgcggttctgtttgtttctgccgcagttttacttgtcatcagctatacttcatctgatttcatcacccgaaaaacatttgcaaaagaggccggggaatactggatcggagagaacttgctccaaaacggcgcgctgctgtcaagccgccatatgacacagggacaaaaggtccaaactggtacacagcgttttccgtatggcaccgtttcttttcacatcacggggagtgatcgccgggaaacggttcaggttacaattcaggcggaaaccacgacaggaacgagacgggaggctcaccttttgttcgatcagaagaagaaacagctgattcaatggacggaagtataaaaaagaggcggcgggacaacacttcatagtaaagacagcactatgaggtgagagccgtgaaaacaaatgattatgtaaaatatatgactgagcaattcgttaaatatttcgatacgccgaaacaggaacggagagagcgaaaagaagtgcggaaagaaaagaaagtgccggcttctcagcactggttcggaatattgccgtatagttttaagctgtggatgcagcggaaaaaataaagtgaatcacgcgaaaggtcctcctgatacaggagggccttattggtattcctcaatgacggcaattttatttaccttttggctgtagggattaaaagaaatcgtaacaaacacgccaaattcttttgcgccatcccgcaatgtcaagtggtattgcttgactgcttcgtccgttcttttccgatcccacaccttttgaataaataacgtttgggagagcggatatctttttttagcttccttttctgctaacttttcccatcttgatttatggtgaacagcataataaggcaccgtttccccctgagctgttcctgaaaccccgaaaacaagaagagaaaggcaaatcagactttgtttgatcatcattcttcgtcctttcgctgtatatactttccattttgttctaggcacctcgttattttctcacgttttattagaaaaaattccaaaaaggtgtgtaatttgaagcaaaacgctgtttttaaaagataccattctcaaaaacgaacaatttgaccgattttgacatttttcaagacgataatccttgattatactttgttcatacagttctttaaagagaacggttgtcatatttattaacagttttacagggggtaaggcatgttccgattgttgcgaatggaaaaaaagggcaaggtgagatggcggatgatgctattgttacggctttcgttcattttttgcctgtccgtgacgatatgtgctcagttcacaggtgatacaagttcctccttcaatgatgtgaaaagcttcagtctccaggttcaaacgtgcggagattttcaatatacggatgacgattgccgttatgacgaacgctgggatcaaagtgatttacatataacaaatcaaactgatacgtcaggcaccgtgtgtgcgccgcttcagctctatgccgagctggagaataagggaaaagagcggactgtttctgactggaaatggaagctccataaaatcgcttctcagcagcagcctttacgaaacggcaatgttgtggataaagggcttattactgataaaaaaagcaaaacgatttataaaattgagtcaaagcggtctttgcagccgggcatatacgcattcaaggtttacaagcctgaagggtatccggcggacgaagaaaaatttgagtggtcaaaaccgatgaaactcgtcaaatgccgggaacaggcgacagtttccgatctaaagaaaacagagaaagagccggctgagccggtaaaagaaagcggggaagaacatgaaaaaaacgctgaaactgatcagtaatattttgtatgccgtcatcttcagcttgattattgtgctgacgttaacggtgatttcgacccgggcttccgggggtgagccggccatcttcggctatacgctgaaatccgtgctgtcgggttcaatggacccggaatttaagacgggttcgctcatagcggtaaagaaaatttctgacgtgaatgacttagaaaaaggggatgtgatcacctttacccaagatgacggaacagccgtcacacacagaataatcgggatcacaaaaaaggacgggaacctgctgtttgagacaaaaggggaccataatgccgccccggatgccgcacccgttcaagctgaaaaagtggcggcccagtatacaggatatcagcttccgtatgccggatatgtcatacatttggccagccagccgatcggaacggcgattctgttaatcgttcccggcgtcatgcttttgatttactcaataacagtcattgtcagcgccctccgcgatattgagcggaaaacgaaagcgctggaagaacatgcgaaaaagggaaccatctccacatgaatacggttgcaacctggcgacaggatttgataacaaaaataaaaagtaaggggagagtacaaacatgggtatgaaaaagaaattaagcttgggcgttgcctcagccgcactcggtttagcattagtaggaggaggcacatgggccgcatttaatgatgtgaagtcgacagacgctacatttgcgtcaggaacacttgatttatcggctaaagaacaatcagccaatgtcaatttgtcaaacttaaaaccaggcgataaattgacgaaagattttgaattcagaaacaatggttcacttgctattaaagaagtgctgatggctttgaattttactgactttaaaggagcaaagaaaggaaatgaatctgcggaggatttcctcagtcagtttgaaattacggttctgacagtcggtaaagaagggggcaacggctatcctaaaaatatcattttgaaggcggccagcctgaaagacttatacttaatgtcaacaaaacaggataaagcagctgccgaagcgatcagcaagcacattgatccgaaattcctgagtgagagcggaaaagtcaatgtagcaaccattaacggcaaaacagctcctgagtacgacggagttccgaaaacgcctgctgattatgaccaggtgagaatggaaatccaatttaaaaatgacaccgcaaaaactgcggacggattaagtgtgcaaaacaagttccaaggcaatgcgatttctcttcaattctcttttgaagcaacgcaatggaacggcttgaccattacgaaagatcatacggataaagacggttacgtcaaggaaaatgaaaaggctcacagtgaggataaaaactaatccgaaagtcggacagttaaaagaggagttgtgcacatatggcggcactactcctctttttgcgcttttctccatttttgataatctaaaaattcacgaaattgtttttttgataccccggatgtcatcgcatcgcgaactaatttctcccattcactatctaattgaccatcgtattcggtttcatgtttttcatcaagtaaagtatgaaccgagacgtccagaacagcggagactttttcgagaaattgaatggaggggttcgtctgtaaatttcgttctattgagcttaaataagacttcgctaccccagctttttcagctagttctgatagtgagtagcctttttcttttcggtattgtttaatacgctggccaatcaatgtcatcaccttccttgtgatattatagcacattcagaaaggatttacggtatgacttctggctgcctggatatgttgagaagactttttatgcgaaagcaggtatttgcgtatttcttctaggctgatatttgctttttgggcttctaatatcagctcaacccattccttatctaattgcgaaaattccatttttgcatttttcatgcattttctcctcctaaaatacttgtttatgtatttcagccaatccgcccatgaccttatctttacatgtctggaagtgattcatcgcatgcgaaacgccagaaattttttctatatacttttattataatatagaatttccagaaaaaacgggaaaggtgtcgaatggataacgcttatccagaaaaattactttgcaggaaaaataaaccgccattttcaatctgaatgtgaatgttcggctgatataaggctttcagcgcttgtttttccaaatggtattcctcaggtttttcctctgtctgctcataaaactgatcgagcagcctgaggtcctttttccatctggcgatcgcgctgtcagcccagtctgacggctctttggcggcagcgtcttttaagtaatgctccattcttttaattccgctttccggcttaatcatcggcgatatggtaaagcaatagtctgatatttgcgaggtcagcggaagcggtgcaagcttctgctgaaacccctctataattgttccagaaacaagatgcaggcctaaagacaaaagtctgtcttttttcatgtcggattggtatgaaatcactacatttaatccaagccagggctgaagcggcactctggctccggctgatacaattttctcatatattcttgtaaatctcccattttgtttaactgcttgaaagatttgaaagaggcgcggggctccaaagtaaataaattcgccgtccatatcctccggagccgtttctttatcagtgatgaacgtgatcttcatcgggttcggttcgccgcccgttttttcacgccaatgccaataaaacgggcggttcataatttgtttgtccatctcgaccgtcaactgaaccgtcataaaacccggcccgtgttctgtaatcggacagtggttcgcttcaaaaaagcgcagtaaaaattcgtgaacctcctgctgtctcatgtcgcgcttcctccttttagattaagatcctttttttctggcgggcttttccgtaccgtacgacagaaaagaggtgagattgtccattttgattctcatttcttcctctgtcagcgaatggcataaaatatcatgcaaatggtcttcaaaattgctcactttgatttttgttaagatgtcatctaattctccgacgacattttcaaataaatgaattttgtcatacagaagttttaagatatgctcttccaccgtatgttttgtcgccatattgtagatatggacatctctttcctgaccgagtctgtgaatccttccgattctttgttcaagccgcatcgggttccacgggaggtcataattgataatatggttgcagaattgcaggttgatcccttcgcctccggcttctgtagcgatcagcacctgcactttgccgcggaagagatccttcatccagtctttttttccgcgtttaaatccgcctctgaacggaacggagcttatgccgttctgctgaaggaaccattgcaggtaaatctgtgtcgccctgtattcagtaaaaataatgactttgtcattaatcttttggatcaagtcaacaacttgaatcgcttttgagttttgcgtgacttgattgatgcggtccattaaattagcgatcgtctgatcatcgaatgcgggcgcttgtttgtctttttggtcaagcatttttttgagcgtcatatacacggcttccctgcttgaacagcattctctttgcagcgtcataatggaaaatgcgctggcgggcttttccgtgccgtttttcagtgcggcgatgtcatcgtaaagcgcctgttccgtcggtgaaaaggtgatcggcactgtttccacgtggcgcttcgtccatgtaaggccggtgtcgctccgcgtgttgcggatcatcactttattgacgagctctttcaaatgctcatgagcgtcaatcccgtccttctgattgaaggtttcttgaaatccgctttcgtttcctaaatggccgggctttaacagtgacactaaattgaagatttcttcgatccggttttgaatcggcgtcgccgtcagaagcaggcagtatttcttcacaagacttctcgcaaattcataatttttcgttttgctgtttttgagcttgtgcgcctcgtcaataatgacgagatcatacggaatagaaagcacaatgtctttgtgaggcgagcgtttggccgtatcaatagaagaaacgacgatatcgcactgttcccacacatagcttttcttctgttcaacagcgggtattaaaaacttctcctgaagctctttcacccactgggaaacgagtgatgccggcacaagaatcaggatttttttggccagcccgcgaatcatatattcttttaaaatcaggcccgcttccaccgtttttccgagccccacttcatcagccaaaatcgccttgccgttcattttttcaacgactttctgcgcgacctcaagctgatgtggaagcggagtgaaatcgggcaggtataaaggagccctcaacccttcaaattcaggaatggcaagggtctgctggacttcagccgacagtttgtacatctcccaatttgaccagggaccgtccgttttcagccgctcagaaaactctcccggccagtttgcatcaaatatgatctctgctgtcatatgtaacaaaaccgcctttcttttaaaaaactgatttatcataatttttgttgccggacgtaaatgagggtggtaggatataagtaatgatttcactaaaagatattgctttagtatgtccataaaattggtaaatatgagcgaatgacagcaaggggagagactcggacgaaagatgggcgtccgggcgccgaaggagcaaactgcggagtgaatctctcaggcaaaagaactcttgctcgacgcaactctggagagtgtctgcacttagaagaagcaggccaccaaaggggacgtctttatgatatgttcataaagtaaactttcaggtgccgggacagagaaaccttcattttcatgaggtgtttctctgtccttttttatatgtttttacaatgcgccaatgactgaagggggaagatgatgctgaaacgaacaccgctttatgacgtgtataaagaatacggcggaaaaacgattgattttggaggatgggagctgccggttcaattttcttctattaaagaggagcatgaagccgtccgcacaaaagcgggcctgtttgatgtgtctcatatgggggaagtcgaagtatccggtaaagacgccctgttttttctgcaaaaaatgatgacaaatgacgttgccgatttaaagccgggaaacgcgctttataccgccatgtgttatcctgacggcggtacggtcgatgacttgctgatctatcagaaaagcgagagctgctatctgctcgtgattaacgcgtctaatattgaaaaagacatcgcttggctgacggaacatgcggaaggcgatgtcacgctgacgaatcagtctgacgggatttcactgcttgccgttcaggggccgaatgctcagtcggttcttacgaagctgactgaatgtgatttgtcctccttaaagccgtttacgtttattgatggggcggacgttgccggacgacaagtcctgctttcaagaacaggctataccggtgaagacgggtttgagttatattgccgcaatgaagatgcggttcatctatttaaggagatacttgcagcgggagagcatgaaggcctcgttccgtgcggcctcggcgcccgtgatacgctgagatttgaagcgaagcttgctttatacggtcaggaattgacgaaagatattacaccgattgaagccggaatcggatttgccgtgaaacacaagaaagattcggattttttcgggaagtctgtattgcgcgaacagaaagaaaaaggagccccgcgaaagctggtcggacttgagatgattgaaaaagggattccgagacacgggtacgccgtgaaaaaagacggtgttccgatcggtgaagtcacgacaggcacgcaatctccgactttaaagaaaaatatcggccttgccttaatcaaaacggaattcagtgaagtcggaacggaagtagaagtggaaatccgtaaaaaaacggttaaagcgaagattgtccgcacaccgttttataaacgtccaaaacagagctgaaaaaaggagagtcatatgaagcatcgatatttgcccgcgacagaacaggataaaaaagaaatgctgaaagccatcggcgcagaaacaattgatgaactgtttgccgatattccggaagatgtgaggtttcaaaaagactaccaaattaaaaaagcaaagtcagaaactgagctgacgagagagctgacaaagcttgcggcgaaaaataaagacgctgttacatatgcatcttttctgggtgcaggagtgtacgatcactaccagccggttatcgtcgatcatgtgatatcccgatcagagttttacacggcatatacgccttatcagcctgaaatctcacaaggagagctgcaggcgatttttgaatttcaaacgatgatctgtgaattaacgggaatggatatcgcaaactcctctatgtacgacgggggaacggcgctggcggaagcggcgatgcttgcatcgggacatacgaaaaagaaaaaaatcgtcatttccgcagccgtacatccggaatcgcgggatgttttgaaaacatacgcaaagggccaatatattgaggttgtagaggtgcccgcgaaaaacggcgtcacagatcttgaagcattggaacatgccgtttgtgatgaaacggccgccgtcatcgtccagtatccgaacttcttcggacaaatcgagccgttaaaggacattgagccgctcgcacataaaggaaacagccagctgattgtttcttcaaacccgctcgcgctcggtattttgacaccgcccggggcatacggagctgatatcgttgtcggggacgcgcagcctttcggcatacctgcggcgttcggcggcccgcactgcggctattttgcagtaacgaaaaaactgatgagaaaggtgccgggccggcttgtcggccaaacggaagatgaaaacgggcgaagaggttttgttctcacccttcaggcgcgtgagcagcatatcagaagagacaaagccacgtctaacatttgttcaaatcaggcgctgaatgctttagcagcttcagtcgcgatgacggcgctcggaaaaaacggcgtcaaagacatggcccgccaaaatatattgaaagctgattacgcgagacgccaagcggaaaaagccggcttgcacgtagcatttgacggcccgatatttaatgaatttgccgtcaggctgaatcttcccgtcaaggaagcaaaccggcggctcctgcaagacggcataatcggcggatatgacttaggccttgcgtatccggaactgaatcagcatatgctcattgccgtcacagagctgagaacaaaagaagagatcgattcgcttattgcgggattgggggatcaacatgaataatcaagatcaggcgcttatttttgaaatgtcccgcgaagggcgtatcggttacagccttccggagcttgatgtgccggaaacagagcttgaaagccttcttcccggtgactatatccgcgatgaagacgcaaagctgccggaagtatcagagctcgatattatgcggcattataccgctctttctaagaggaaccacggagttgattcaggcttttatccgctcggctcctgtacgatgaaatacaatccgaaattaaatgaaaaaattgcccggatcgcaggtttttccgctattcatccgcttcaggacgaggacacggttcagggggcgcttgagcttttatacgatttaagcggacacttggaggagattacgggcatggacgaggtgacgctgcagcctgcggcgggcgctcacggcgaatggaccggcctgatgatgatccgcgcctatcacgaagcacggggagacttcggacggacgaaggtgattgtccctgattcagcccacggtacgaatccggcatccgccacggtcgccggttttgaaacgattaccgttaagtcaaatgagcacgggctggttgacattgaagatttgaaaagagcggtaaacgaagaaacagcggcgctgatgctgacgaatccgaacacccttggattatttgaggaaaacattacggaaatggctgaaatcgtccatcaggccggcggaaagctttattatgacggagcgaatttaaatgccgttttaagtaaagcaagaccgggagatatgggatttgacgtcgttcaccttaatctgcataaaacatttaccgggccgcacggcgggggaggaccgggctcaggtccggtcggagtgaaaaaagaattcattccgtatctgccgaaacccgttctcacgaaaaaagagggccgtttgacttttgactatgaccggccgcagtcgatcgggcgcgtaaaaccttattacggcaacttcggcattaatgtcagagcctacacgtatatccggtccatggggcctgacggcttaaaagctgtgaccgaaaacgcggttttaaatgcaaattatatgatgagaagactcgcgccttattatgatctcccgtatgaccgtcattgcaagcatgaatttgtgttatcgggaagaaggcagaaaaagctcggcgtaagaacgcttgatattgccaaacggcttttggatttcggctatcatccgccgactgtgtattttcctctcaatgttgaagaaagcatcatgatcgaaccgacggaaacggaatcgaaggaaacgcttgatgcgtttatagatgccatgattcaaattgcgcgggaagcggaggaatcgcctgaaatcgttcaggaggcgccgcatacaacagttgtcaaaagaatggatgaaaccaaggcggcaagaaagccggttttaaaatacgaacgtacacctgacgtcagccgctgacacggtataaaaaaagagcttccgtataaaacggacagctcttttttcatgattagttttttgctttaatttttccgccccattttttaaatccgcctttcaggttgtaaatatctttgcagccgtgtttgcggagcgtctgtgccgcgcgtccgctgcggacattgttttggcagtacagataaacgggtttatcaggacggatttcacttttgcgctgtttcagctgtgacagcggaatgttgcgcgcgccgagaatatggccgccttcaaattcattcggctcacggacgtcaatcagctgcgcttttctgtagcccgcgcggaattcctcttccgtaagtgttttcattaaacgctgctggtaaaaatacgaaacgatcatataaacgataaacgccgcaacaataattaaagcaatcatattagacaatgcaattctactcctttagcttataaaatcaaaaccctgcttcctgaaaacaaggcttaccggacgttttgggacaaatactattatagtaaagcatgaagcgattgtcatccttaatgaaacgaaatatttttcattttcaaggcagtttgttaaactgattttattaaaacgataaagaagggttcagtgtatggaaaaagaaacatggcggtttattgactcagggaatgaaagcccggcatttaacatggcgctggatgaagcgcttttatattggcacagccaaaagaaaattcctccggtgatccgattttacggctggaatccggcaactttgtctgtcgggtattttcaaaatattaagaaggaaattaactttgacgcagtacataaacacggcctcgggtttgtcagaagaccgacaggcggacggggtgttctgcatgataaagaattgacatacagcgtaatcgtttcagaggatcacccggaaatgccggccacggtgacagaggcgtaccgggtgatttcagaaggtattctgcagggattcagaaaccttggacttgatgcctgctttgcgattccgcgaacggagaaagaaaaagaaagcttgaaaaatccgcgctcgtccgtctgctttgatgcgccttcgtggtatgaactggtcgttgaaggacggaaagttgccggaagcgcacagacacgccaaaaaggcgtcattcttcagcacggttccatcctgctcgacattgatgaggataaactgtttgatctgtttttatatccgagcgacagagtccgtgagcgcatgcagcggaatttcaaaaacaaagcggtagccatcaacgccttagcgccgaaacgggtaacgatggatgaggccagaatcgcttttaaagccggttttgaggaagggctgaacatacatcttgagccctacacactcacgtctgaagagcttgcatttgtcaatgagctggctgagacgaaatacgcgtccgatgaatggaattataagcgctgataaggcttgacagaccggaagcatccttgttttttcatgaccgttagtgtaaacttgtaatggtttataaagttaaggtgctttttgggagggttacttatgacaacaccaagtatggaagattatattgaacagatttatatgctgatagaagaaaaaggatatgcacgggtttctgatatcgcggaagctttggcagtccacccctcctctgtaacgaaaatggttcaaaaactagataaagacgagtatttgatttatgaaaaatatcgcgggctcgtattgacgtcaaaaggcaaaaagatcggcaaacggctcgtatacagacacgaattgcttgagcagtttttaagaatcattggtgttgatgaagagaagatttacaatgatgttgaaggaatcgaacatcatctgagctggaacagcattgaccgcatcggcgacctcgttcagtattttgaagatgacgaaagccggaaaaaagaattgaaatccgtacagaaaaaaaccgaaaatcccggtgaataaagggcagcccgaaatggggcgccctttttttaatgtcttcattctttggtctatttcgcccagccgtttcttaaaataataatacaccttgagatggaagggagagggcgcgctatgcagattgacggcgtattttcgggaggggggataaaaggggtggcgcttgccggcgcttatgaagcgctggaagaaaagggctttcgctttgaaaggctcgccggaacaagcgccggcgcaattattgccgcatttatcgctgcgggctatacgagcagagaggttcattccatcatagatgaggtggacggaaggcaattgcttgatcagagatactcattcctcccgctgaaaatcctgcggtgggtgtcgatatattggcgcctcggactatacagaggcgatatgctggaaaaatggattgcggataaattaaaagcgaagggcatcatcgcgttcggcgatttgaaaaaaggctcgctccgtctcatcgcttcagatctgacgaacggaacgatgatcgtgcttcctgacgatcttccccgctacggattaaatccggagatgttcccggttgccagagccgtcagaatgagctgcagcattccttatttttttgaaccgataaaactgaagacagaaaaaggcacctcaacggtcgttgacggcggcgtgttaagcaatttcccgatttggctgtattcaaaagaacgcaaacggccggtcgtcggaatttcgctttctccaaacgaaaaagagcgcccgaaaaaatcaatccgcaacgcttttgagctgttcggggctttgtttgaaacgatgaaagacgctcatgatgccaggcatatcgcgacaaagtacgaacagaatattatttttattccggtggaacatgtgatggcgacggagtttcatctcacaccgcaaaaaaaactagctctcattgagctaggaaaaagcagaacagagcaatttttgaagcaatggagctattaaaaaagcgctctgtttttctttttattctttttgccttctatgacggtaagctgggtctggctttttttcttaagaatcatcggcttcggtctgctgctgctcggcacgctccgcaaatggctgacccggcctctgtgtccggcgcggtgcttcgctttttgctccttcattcggagccgcgattgtctggccgcttttctgaaagcggttccgtcacggccggtgcggcggttcaggaccgtcctcacgataaaataaataatgatgcctgcgataataacggtgatcgctcttgaaatcatctgcccggggttggttaccgccgcataaatgaaaccgaatgcgccaagcgctatcaatacagcaaaaaaaggttgtacacgatgattcataactgcccacctccaaaataataacggtaacggttcagattacgttgtgagacggtttttcgctctgttctgaaatgtcttccagtctgagaagctcgttaaagctttctatggcaacctcgacctggtcatccgccggttcctttgtcgttaaaagctgcagccacaggccgggataaccgagcactttcaaaacggggatattccgcactctgttcgtcagctggagcacttcaaaggagatgccgagaacgaccggtataagcgcaatcctgtctaaaatccgcacccaaagcggatctgtcggaacgagtaaatagatgaacatgccgacaatgatcgtaaataaaataaagcttgaaccgcaacggtaatgaagccgtgactgcttctgaacattttctattgtaattggcaaattctgttcataacagtttatgaccttatgttcggctccatgatattgaaacactcttttaattaacggcgtcattgataaaaaataaatgtagctgagaagcagaataagcttaaacagactttcgattccgatctgcgcggcgtctgaggaaaatacgggccttacaagctccgctaagaagaccgggacgagcgtaaaaacgaatttgctgaacaaaaacgacagaacgccgatcaccgccaggctgaaaaacatcgataagcccgaacctttcttatcttcctggtccagctttgcgtcatcttgaggatcaagcccgtaacgttcgctggaaaagtttaaatgctttgtgccgttggcgctcgcctcaatgatggcgacgattccccgcaaaaaaggaatcttttttaaagccgaaagcttggcgttcggcactctcggaagcttgaaaaaatcaatgcttccgtcattcctgcggatggcggtaacataattttttctgccgccgaacatgaccccttcaacgacagcctgcccgccgtaagcagggggcgttttttgtttggacattgtttatcaacctgcctgtttttttaggatttactaaccatttcctttcactctattgtacaggaaaccgcggtaaacctctagttagacagccggaaaatcaatgctttttctacatgcagtataccccgtttctttagattttactcattgaatgaaaatatggcgcagctttttatgacttttcaattttggggcagtctatgactggaggtgccatgatgacaagcgaaaaacattcagaacaggaagaaaaaaagaagcaggatgatgatcagcagcctgtttcatttaccggcagaatttgcggtatcggatttgccggcggtgtattttggagtttgatcggatatctcgggtatgtctttcatttttcagagatcagccccaacatgattcttcagccgtttatgatcggagaatggaaaaaacaatggctcggcacgatggtcagcatcgttgtcatcggattcatttcaattgccggggcgtttatttatttcgtctgcctgaaacgttttaaaaccatgtggccggggatggtgtacggcgtcattttatggtgtgcggtttttttcttattcaatccgattttcgaagatgtgaaatccgtcactgaattgaaatcagatacaatcgtgacgacgctttgcctttacattctgtacggtttgtttgtcggctactcaatttccttcaactacaatgaacttacgtcagacaagcttgcaagggcgctcggcaacaagtgaataagtgtataatccctgtccggtatggtaaaatgttcacgagaagtgaacattttttatgctgaaaaccgggcggggatgctcccgcgttgtcaggcggcagtcaagaatcggcgaggaggagaaagggaatgaaacttgagaaattgcgaaatcttttcggtcagctggatatagacggaatgttggtgacaagctccgccaatctgcagtatatgacgggatttacgggttcgtcaggccttgcggtcatatcgaaagaacgtgcggcatttatcacggatttccgttacaccgagcaggcgaagacgcaagtgaagggttttgacattatcgagcacggcggaagcttaatccaaacggctgcggatacgattcttgagtacggcattaaaaaactcggcttcgagcaaaacagcatgacgtacggaacatatgcatcctaccaagctgtgctgcaggaagcggagatggttcccgtcgcggattccgttgaaaagttgcgcttgattaagtcaagtgaagagattaagatattagaggaagctgcgaagattgcggatgatgcgtttgaacatattctgacgtttatcaaaccgggcatctcagagatttcagttgcaaacgagcttgaattttatatgagacgtcaaggagcagacggctcttcctttgatatgatcgtcgcctcgggagttagatccagccttccccacggagtggcaagcggcaaattgattgaaaagggagacttggtcacgctcgatttcggcgcttattataaaggctattgttctgatatcacacgcaccgtcgcggtcggagagccaagtgataaactgaaagagatttatcaggtcgtatacgatgcccaagcgcttggtgtcctgcatattaaacccggcatgacgggaaaagaagcggacgccctgacgagggatcacatcaccgcaaaaggctacggacagtatttcggccattcgacaggacacgggttcggaatggaagtccatgaatcaccggggctgtctttcaggtcatcggccgttcttgagccgggcatggcggtaacggttgagccgggcatatacataccggaagttgggggcgcaagaatcgaagatgatatcatcatcactgaggacggcaaccggacaattacgcattcccctaaagaattaattattttgtgatcggaatataggaggacatcaaacatgatttcagttaacgattttcgtacaggactaacgattgaagtagacggcggcatttggcgcgtcgttgacttccagcacgtaaagccgggaaaaggagcggcatttgtccgttctaaattgcgtaacctgcgcacgggcgctattcaggagaaaacattccgtgcaggtgaaaaagtcgcgaaagctcaaattgaaacaaaaacgatgcagtatctttatgccaacggcgatcagcacgtgttcatggatacaagctcatatgaacagcttgaattgaacgaaaaccaaatcgaagaagaattaaaatatcttctggaaaatatgtctgtgcacatcatgatgtaccagtctgaaacgctcggtattgaactgccgaacacagttgaactgaaagttgttgaaacagagccgggaattaaaggcgacacggcgtcaggcggcacgaaacctgccaaaacggaaacaggtcttgtcgtaaacgtaccgtttttcgtgaacgaaggcgatacgctggttgtaaatacatcagacggttcttacgtgtcaagagcgtagttaaagaaattcggagtctgctccttttacggggcaggctttttttgcgttctgcctcataatctttcttctatatgaaaatagtgagactacttccgtcagctagagcatatagtgtaacaaaatgcttgaagttgggggattgcaatgaaatttttgtttggttcaatcaattctactgttttaacgatggccggtttacgagttttgtcctcgctcattgaattatcggccgctattatcatgcttttgacaaacgacatcagaaaagcggttgtggtgaatagtattttggcaatcgtcggcccgctgatctttatcatcacaatgacgatcggcatttatcagattgccggacagctctcatatgcaaaattaatattgatttttgcgggagtggtgctgattttggccggtgtgcataaatagagggccggggtgtcataaagtctgtcccggatcatacattttaaagaagccaatcggtaaaaaaggaggagactctattgaatgagattacagaggttctccctgaattattgagacatgccatctccgccgtgcccgaagcagcgaggcgggatacagaagaaatcagaatccgtgtcgacaggccggttgaactgatccaaaaaggacaacctttgtatttgtcatatgtctgtacggccggcgacgcacagctgatcctcagccggctcagcaattacagtatgtacacgctggaagaagagctgaaaaaaggatatatcacaatcagaggaggccaccgagtggggctggccggaagagtcatcgtcgaaaacggagctgtcaaaggactccgggatattacttcttttaatatccgaatcgcccgggagaagctgggaatcgcagaaccgctcattcctttcttatggaaagaaaactggctgaatacgctgatcatcggtcctccgcaaacggggaaaacgaccttgcttcgtgatttggcccggctttccagcaccggatcaaaacgcattcctgcaaaaaagacaggtatcgtagatgaacgttcggaaattgccggctgcctgcggggcattccccagcacagtttcggccgcagaatcgatgtccttgatgcctgtccgaaggcggaagggctgatgatgatgattcgctcgatgagtcctgatgtgataattgtggatgaaatcgggagaatggaagactcacaagcgctgctggaggcgctccatgcgggcgtatccgttatcgtatctgcgcacgggtggaatatgaaagacttggtaaagaggccgtcgctgaaaatgctttgggaggaaaacgtgtttgaccggtatgttgaactgtcaaggcgccgcggtcccggaacgatcagcaggatgtacggaaaggacgggaaacctgttccgcatgctgaaagcgtgatgacatgctgaagcttttgggtgccgtgtttattctgacagcgacgacttggaccggatttgagatcgccaaaatgtatatagaaaggccgaggcagatccgccagctgcgcgcggcgctccaatcgctagaagcggaaattatgttcgggcatacaccgctgcataccgcctcgggacaaattgccgcacagctttccaaacctgtatcattattgtttcaagctttcagcacaaggcttgagcagggaagcgattccgccaaaacggcttgggaacagagcttgaaacataattggtcttccatggcgatgaaaaaaagcgaatatgatgtgctgaagcaattcggagagacgctcgggctccatgaccgtgtttctcagcagaaacatatcaagcttgcgcttacacatttggaagcggcggaagcggatgccggacgggcgcaggcgaaaaatgaaaaaatggtgaaaagcttaggatttttagccggactgttactcattcttctattgatgtaaacatgaggggagcaaacataaaatgggagtcgacgtaaatgtcatttttcaaatcgccggagtcggtatcgtggttgcgtttctgcacaccatacttgaccaaatgggaaaaaaagaatacgcccagtgggtgacgctgcttggctttatctatattttatttatggtggcgacgattgtcgatgacctgttcaaaaagatcaaagctgtgtttctattccaaggataggggggcttacagattgagattgttcaaattgtaggtttaggcctgatcgccacatttctctccctgatcgtaaaagaacagaaaccgactttcgcgtttatgattgtcgtcttcagcggctgcgtgatctttctttatctcatcgaccagatttacgacattatcagaatgatagaaaaaatagccgtcaatgcaaatgtcaatatggtctatgtggaaaccattttaaaaattatcggcatcgcctacatcgctgaattcggagcgcagcttacaaaggatgcgggccagggagcgattgcttcgaaaatagagctggccggaaaaattttgatactggtaatggccgtgccgatactcaccgtcattattgaaacgattctcggacttattccttcttgatcaaaaataaaatggaaagggggggcacaaaaaatgaagcgctttcggtgggcgggagcttttttgttcatcctcttattttttcagactgaatgtgtacaagctgccggaacagacggtgcgtcgcaggaaaccgcagttcaccaagaatccgctgatgaagtggcgaaaaagcaggccgaagcgctgaaaacagaaggcatcggaaagttttgggacgacatcatgacagaatacggcggtcttctgcctgaaagccaaaagggaagcatcatcgactttattaacggagaaaaaacgttctcgccggaggcatggctgaaggctttattttcatacttgtttcatgaagtgctcgcaaacggaaagcttctgggaactttgattcttctcaccattttttgtgtcattctgcagctcctgcaaaatgcgttccagcagagcaccgtcagcaaagtggcttatgcaatcgtctacatggtgctgattattctcgctttaaacagctttcatgttgccgtcaattatgccagtgaagcgatccagacgatgacaagcttcattctcgcgctcatcccgcttttactcgcgcttttggcgtcttccgggggagccgtctccgcagctttttttcaccccgttattttatttctgatgaatacgagcggccttctcattcaaaacatcgtcatgccgcttatcttcctgtcagcgattttaagcatcgtcagcacgatgacggatcaatataaagtcacgcagcttgccaatctgctcagaaatatcgcgatcggcgcgcttgccgtatttctcaccgtgtttctcggcgtcatctccgtacagggggcttcggccgccgtgacggacgggattacgctcaggactgcaaaatttataacaggcaattttattcccgtgctcggccggatgtttacggatgcgacggatacggtcatcagcgcttcgctcctattaaaaaacaccgtgggaatcctcggagtcggaattttgatctgcatctccgcgtttccggcgatcaaagtgctctcgctcgcttttatttataagcttgcggccgctattctgcagccgctcggaggcgggcccgtcattacgtgcctcggcgtcatcagcagaagcgtactgtatattttcgcggcgctcgccatcgtctctctcatgtttttcctcagcatcacagtcattattacagcaggcaacctcaccatgatgatgaaataaaggaggcccattggatatgagctttttaacagaatggctgacaagcattattttatttatcttattcgccatcgtcatcgacatgctgctgcccagctccagtatgcaaaaatacgcaaagatggttgtcagcctgctgttaatcattgtcatgctcaacccgatattcaaacttttcaaaacagacccggaaatcatcttcgattatttgacaaaacaagagcaatctcaatccgctgatataaaaaatcaaattaaatcagaaaaaaaagaaatacaagcatcaaaccgcgcatatgttttagaagaaatggctgtccaactaaaaaagaaagcggaggagatgttcagtcatgacgaatacaaaatagacgacatccgccttacagcggaagaacaggttcgttcagaagaagatgtaaaaacgatcagcgtgtatatggccccatcttctgaaaaaaccgtgcaaaccgtcgcaccgatcgacatccgcacagaccgcaaatacgaaccggaaggcgcagccgacaaaaaagaggccgcagacatcaaagaaaaacttgcggatatatgggaaatcggcagtgagaaaattacggtttatatggaaggcggggagaaaaacggccatgaataaaaacggactatggaccatactcaaaaaacagctgatgatcggacaggcgaaagacggagaaaaaccaaaactgacaaaatatcattactttctgttcgtgtttgtgctcggggtatcttttatgctggtcagccagctgttctcttcaccggagaaaaccgagaaggaccaaacggcgcagaccgtcatgtccggccgaacggaagacaaaagcgggcaaaaaagcgcacccgtttttaaggcatcgaaagacggcagcgcaaaaaccacaatcgatgattacgaaagagactatgaaaaccagctgaaagaaatccttgaaacgattatcggcgtggaggatgtctcaattgtcgtaaacgtagacgcaacatctctgaaagtgtttgagaaaaataaaacgaaaaaagacaccaccactgaagaaaccgataaagaaggcggcaaaagaagcgtaaccgatcaaacctctgaagaacaaattgtcatgattcgaaacggggaccaggaaaccccggtcgtcgtccagacgaaaaagcccgatatccgcggtgtactcgttgtcgctcagggagtggacaacgttcaaataaaaaaaaccatcattgatgccgtcacaagggtgctcgatgttccgagctatcgtgtagcggttgcccctaaaaaaatcaaggaggattcataaatcatgctgaaaaaacaaacggtttggcttttaacaatgctcagtctcgtcgtggtattaagtgtttattatattatgtcgccggaaagcaaaaatgccgtgcagatgaaaagcgaaaaaagcagcggagaagtcgccactgaaaaaacgccggctcctgaaacgaaagataagagcggaaacggaacggaaaaagaagacggcacaaaaggaacgaaagattctaaaggcacaaaagaggataaagaaacatcagccgaagcatcggacaaagacggatcggtcgccacagaaacagctgatgaaaacttatttaccgcataccgcatggagcttgaagacgcgagaagcaaagaaagggaacagttaaacagcattgtttcaagcgatgatgcgaccgcaaaggaaaaaagcgaagcctacgataaaatgacggcgctgagcaatgctgaagggacggaaaaacagctggaaacgctgattaaaacacaaggctacaaagatgcgctcgtggatgctgaaggagacaaaatcaacattaccgtcatgtctgacaaacattcaaacgcaaaagcttccgctatcattgacctggtggaaaaagaaatcaagacgatgaaagacgtcgccgtcacgtttgaaccgacaaaataagagacctgaaccgcccgcacccgctgcgggcttttctgatgtcattttagatcagtgttgaatttacacaagcgctcctgtaagataaacatagtatgtacttttagtagcaacccataaatttctattttttatacataggagtggaaactgatgttaaaaatcaacgaaattcatgaactgataaaaagaatcgatgaatcttccatcgacgaatttgtttacgaaattgaaggcgtaagcctcaaactgaaaaaaaatgaagcgccggcagtgaatgtaacgggacaagcccaagccgttcccgccgcttacgcacctgctccgcaggctgcaaaaccggaagcgagtgaagccgctcctgctcaggaagcgccgaaacaagacgaaaacctgcacaaaattacgtctccgatggtcggaacgttttatgcttcttcatcgccggaagccggcccttacgtaaaccaaggttcaaaagtgagcgaaaatacagttgtttgtatcgtagaagcaatgaaactctttaacgagattgaagccgaagtaaaaggagaaatcgttgaagtgttagttgaaaacggccagctggtcgaatacggacaacctctatttcttgtaaaagctgagtaaggagacctgctattatgattaaaaagctattgatcgccaaccgaggagaaatcgccgtcagaattatccgggcctgcaaagagctgggcattgaaactgtagccgtttattctgaggcagataaagacgccctgcatgtccaaatggccgatgaggctttttgtatcgggccgaaaacatcaaaagaaagctatttaaatgtaacgaacatcgtcagcgtcgcaaagctgaccggcacggatgcgattcatccgggatacgggtttttagctgaaaacgccgactttgccgagctgtgcgaggaattaaacgtaacgtttgtcggccctacggctgacgccatttcaaaaatgggaacaaaagatatcgcccgcgacacgatgcagctggcgggcgtgccgattgtgcccggttcaaaaggaatcataaaaaatacggaagaagcggtttcgcttgcaggtgaaattgggtatcctgtcattataaaagccactgcgggcggaggcggaaaaggcatccgggtcgcacgcacagaagaagaactgatcaaaggcattgagattacccagcaggaagccgctacggcattcggaaatccgggtgtgtacatcgagaagtacatagaagatttccgccatgttgaaattcaggtgcttgcggataattacggaaacacgatccatctcggagagcgtgactgttctatccaaagacgtctgcaaaaacttcttgaagagtcaccgtcacctgcgcttgattctgaaatcagggagcagatgggtgaagcagcggtaaaagcagcgaaggccgtcggttacacgggagccggcacagtagaattcatctatgactacagagaacagcgctactacttcatggagatgaacacgcgtattcaagtagagcaccctgtcacagaaatggtgacgggaacggatctgatcaaagaacagatcaaagtggcatccggacaggagctttcgctcagacaggaagatgttgaatttaacggctgggcgattgaatgccgcatcaacgctgaaaaccctgcgaaaaacttcatgccttcacccggtaaaattaacatgtacctgccgccgggcggacttggcgtacgcgtggattcagccgcatatcccggctattcgatcccgccgtactatgacagtatgattgctaaagtcatcacatacggaacaacgcgtgatgaggcagtcgcacggatgaaacgcgcgctgagcgaattcgtgattgaaggtattgaaacgacgattccgttccatttgaaactgcttgaacacgaaacatttgtcagcggagagtttaatacaaagtttttagaaacatatgatgtaatgggctcataatttttgcgggaggtgaattgaatggaagacaacagtgtgcttaaaatggatcatgatgaggctcatttaggcaaggttgaaattgctcctgaggtcattgaagtcattgccggcatcgccgcttccgaagttgaaggagttgctgaaatgcgcggcaatttcgccacgggcgtcgtagaacgcttcggcaaaatcaatcacggcaaaggcgtaaaggtcgatttagccgatgacgggattaccatcgacgtctattgcgtcgttcaattcgggatctcgatcccgaaagtggcggcaagcgttcaggagaatatccgccaaaccttattaaacatgacgtctctgaccattaatgaaatcaatattcatatcgtcggcattcaatttgacacgaaagcccaagaagtcgaaatcgacgaagaaatgtaatgagcgtataaaaaccaaggggatgggcagccctttggttttttatacgtttcccgtcatttcaggcatgaagaaagccggcttacaaacggcagccgagtttcttcatgctgtgaaatccgaatgaaattaatacggtttgtgaaaatattcggcattagggtgaaaaaacctaaatttcgacatgcgattgagaaaaaaatatgttatgatctctttaagcttaacgacaagcggataaagcggatctgaaggagaaagaaaatgaaaagaagaacagctagagaaaaagctttgcaggcactttttcagattgatgtcagcgatattgcaccgaacgatgccattgagcacgcgcttgatggtgaaaaaacagatgccttctttgaacagctggtgtacggagtgatcgaacatcaggttcagcttgatgaaatgatttccggccatctcgtcaattggaagcttgaccggattgcaaacgtagaccgcgcgatcctgcgtctggcggtgtatgaaatggtttattctgacgacattcctgctaacgtgtcattaaacgaagcaatcgagctggcaaaacggttcggcgacgataaagctgcaaaattcgtaaacggggttctttctaacattaaaactgatatcgaatcataggaggaaagaaaatgactgcaacaatcatcgacggaaaagaaacggctaaagaaaaacgcgaacaattggcaaaagaagtagaagagctgaaagcacaaggcgtagtgcctggattggcggtcattttaatcggagacgatcccgcttctgtttcatatgtgacaggcaagaaaaaagccgctgaaacaatgggaatgaaatttaagcttgaccgctttgactcaagcttaaccgaggcggagcttttaacagtgattgatcagtataatcaaaatccggaattccacggcattctcgtccagctgccgctcccggatcatatttctgaaaaagccgtaatcgagcggatctcccctgataaggatgttgacggtttccaccctctcaacgtcgggaaaatgctgcttggcgaagatacatttcttccatgcacgccgcacggaattgtcgagttattgaaaaagacgaacgtagatctttccggcaaagaagttgttgtagtcggacgaagcaatattgtcggtaaaccggtcggccagctgctgctgaacgaaaacgcgaccgtcacatattgccattcccgcacgaaaaatatgtctgagcatacgaaaaaagcagatattcttgtggtagcggtcggtaaagcgaacttcatcaaagctgatcaaatcaaagagggcgccattgtcattgatgtcggcgtcaaccgtctcgaaagcggaaaactctgcggagacgttcagtttgatgaagcgaaagaaaaagcatctttcattacgccggtgccgggcggagtaggtccgatgaccatcacaatgcttgcgcataatactgttaaatctgccagacgtacgttatcatagataaccggagacagtcacaaaaagtgtgacaatgagcacgatacccgcttcttaaggctcctttcagccagagcgggttttcttagtttagggcaaaaagcctttatgaaaggagtgcaggatgtgagtgaagcggcatatgtcacggtttccgcgctgaccaaatacattaaaagaaaattcgatgtggaccctcatcttgaagacatttggattaagggtgagctctccaatgttaaaattcatacgagaggccacatctattttacattaaaagatgagcatgcccgcatgcaggccgtcatgtttcagaggcaaagttcgaggcttgcgtttaagccagaagacggaatgaaggtcatcgtaagaggcggcatctccgtctatgaaccgagcggaagctatcagctgtacgcgaaagaaatgcagccggacggtgtgggggcgctctacttagcctatgaagaattaaagaaaaaacttgccggcgaagggttgtttgatgaccggcataagcaggccatccccgcttttccggccacgatcggggtcgtcacgtcaccgacgggagcagccgtcagagacgtcattaccacactcaaaagaagatacccccttgtgaaagtcattgtgcttcccgcgctcgttcaaggtgaaaatgccagcagatcgattgtgaagcgcattgaagaagccaatgcacaaaaaatgtgtgacgtcctgatcgtcggaaggggagggggctcgatcgaagaattgtgggcatttaacgaagaaatcgtggcccgggcgatttttgcttccgccattccgattatatcagctgtcggacatgaaacagattttacaatcagtgatttcgtcgcggatatccgggcggcaaccccgacaggagcggcagaaattgccgttccccacacgacggacttaatggaacggacaaaaacggcggaagtccgcctgacaagagcgatgcagcagcatatcaacaagaaaaaagaacgggttcaatcgctccagtcatcctacgcgttccgttttccgaaacgattgtatacccaaaaagaacagcagtttgaccttttgtatcagcagttccaatcacagctcacagggcttacggacaggaaacaaaggcagctggagcggaatacgtacagattaacggcgctccaccctgaaacccagctgaaacaggcgaaaaaacggtacgaggagcgctcaaatcagctcgcccgaagcatgaatgtccagctgaagcagcttcattcgcagtttcagacggttcttggtaaactgaatgcattaagtccccttcaggtgatggagagaggatacagtctggcctataaagacaaagagctgatcaaaagcgttgatcaagtggaacaaaatgatacgcttgaagtaaagatgacagacggcgttctgacgtgtgaagtattgcaaaagagaggcgaacgataatgacagaaaccaaaaaaagtgaagagctgacatttgaagaggcgatgaaaggccttgaaggcattgtggcaaagcttgaagaaggagatgtgccgctggagcaggcgattaattattttcaggaagggatggccctttcaaaaatgtgccatgaaaagctgcagcatgtcgaaaagcaaatggactttattttaaaagataacggcgaacttgcacctttcagcgttcaggaggaagacgaaggtgacaaataaactggacgcatttttagcatcgcgcaaacaactgattgaacagcagctttctttgtatacagaacggcttgcgatgccggaaacccttaaaaaatctatgctgtattctttggaagcgggcggaaagaggctgcgccctctcgtcgtcttagccgttctgaatgcttacggaaaagatgaaaaagacgggattccggtcggatgcgctgtcgaaatgattcatacgtattctttaatccatgatgatctgccttgcatggacgatgatgatctgcgccggggaaagcccacaaaccataaagtcttcggagaagcggcagccgtattggccggagacgggcttctgacagaaagctttaaattgatcacatctcatgtgtctgaggcggtttcagcagaaaaacggctccgtctcgtcgatgagctgatcagcgcggcgggaacggaaggaatggtcggcggacaggctgccgacatggaagcggagcaaaagcggataacgcttgaggagctggaatccatccacgagcggaaaacggccaagctcctcggtttttccgtgacggcgggcgccattttggcagatgcgccggaggatgaagtcgaaaagctccgtttgttcagcagccatatcggcatcggatttcaaatcagagacgacatccttgatattgaagggcatgaggagaggatcggcaaaccggtcggctcagatacgtcgaatgaaaaatcaacgtatccgtcgcttttaacgcttgaaggtgcgaaagaaaagcttgcgtatcatatcagcgaggcgaaacagatcatcagcggcctttctcttcagaaagaattgctgcatgacctctgtgatttaatcgcggcgagagatcattaaaaacggtcctgatttgaaggggctgccgctcctatggtaaaatgtaagcagtttcgatgaaaatacaaagggagtctttttcttttttcaaaaagacactgtttaatttgcagaaattcatgctgaaagtgagttgatccgctttggatcttttatcaatacaggacccgtcatttcttaaaaagatgtcaattgaacagctggaagagctgagtgaggagatccgcaatttcctcatcacatcgctgtctgcctctggcggccatatcgggccgaacctcggggttgtcgagctgacaattgcgcttcacaaagaatttgacagtccgaaagataaatttttatgggatgtcggacatcagtcctatgttcataaactgttaaccggacgcggcaaggagtttgaaaccttgcgccaatataaagggctttgcggtttcccgaaacgcagcgaaagcgaacatgacgtatgggaaacaggccacagctcaacctcgctctcaggcgcgatgggaatggctgccgcccgtgatattaaaggatcgaaagaatatatcatcccgattatcggagacggcgctttaaccggaggaatggcgcttgaagcactgaaccatatcggtgatgagaaaaaagacatgatcgtcatcctgaatgataatgagatgagcattgcgccgaatgtcggggcgattcattctatgctgggacggcttcgcacggccggcaaatatcaatgggtaaaagacgagcttgaatatttatttaagcgcatcccggccgtcggcggaaaattggccgccacagctgaacggataaaagacagtttgaaatatatgcttgtgtcaggcatgttttttgaagagctgggctttacgtatttaggcccggttgacggtcattcctaccacgaactgtttgaaaacctgcaatacgccaaaaaaacgaaaggccctgtccttttacatgtcattacgaaaaagggcaaaggctataaaccggctgagaccgacacaatcggcacatggcacggaacgggtccttataaaatcaatacgggtgatttcgtcaagccgaaagccgcggcgccttcatggagcggacttgtcagcggcaccgtgcaggagctggcgcgcgaggatgacagaattgtcgccattacaccggccatgccggtcggctctaaactggaagggtttgcgaaagaattccctgaacgcatgtttgatgtcggaatcgcagaacagcatgcggcgacgatggcggctggaatggcgctccaaggcatgaagccgtttcttgcgatttattcgacctttttgcagcgggcgtacgatcaggtcgtccatgacatctgccgccaaaacgcgaatgtatttatcggcattgaccgcgccggtttggtcggcgccgacggggagacgcatcaaggcgtctttgacatcgcctttttgcggcatataccaaacctcgttttaatgatgccgaaggatgaaaatgaaggccgccatatggtcaatacagcccttaattatgaggagggtccgatcgcgatgcgcttcccgcgcggaaacgggctcggcgtaaagatggataaagagctgaaaaccattccgatcggaacatgggaagtgctccgtcccggaaaagacgcggtcattttaacattcggtacgaccattgaaatggcgctggaagcggctgaagaactgcaaaaagaaggcctgtccgtgcgtgtcgtgaatgcgcggtttataaaaccgattgataaacaaatgatgaaggccattcttaatgaaggtctgccgattttaacgatagaagaagccgtgcttgaaggcggattcggcagcacgattcttgaatacgctcatgacctcggcatgtatcatacaccgattgacagaatgggcatcccagaccggtttattgaacacggcagcgtaaccgccctgcttgaagaaatcggtctcacgaaggctgaggttatgaaccggatcaaactgctgatgccgccgaagacacataaaggaattggatcatgacagcaaaaaaagaacgattagatgtacttcttgtagaaaaaggccttgcggaaacgcgggaaaaagcgaaacgcgccattatggcgggcatcgtatactcaaatgaaaaccgattggacaaaccgggtgaaaaaatcgcccgggatcttccgttaacggtaaaaggaaaccctcttaaatacgtcagcagaggcggattaaagcttgaaaaagccctggaagtgtttcccgtctcggtaaaaggcaaaacgatgattgacatcggctcgtctacagggggattcacggattgcgccctccaaaacggagccgagcggtcctacgcagtggatgtcggctataatcagcttgcctggaagctcagacaggacgagagggtcgtcgtcatggaacggacgaatttccgctattccgagccttccgatttcacagagggtttgccggaatttgcgacaatcgatgtttctttcatctcactccgcctcattctcccggttttaaaaacgctgcttgtaccggggagcgattgtatcgcactggtaaagccgcaatttgaagccggacgggaatccgtcggaaaaaaaggcattgtcagagatcccggcgttcatactgacgttctccgccgcatgaatcaatttgccgcttctgaaggatatacagtgaaaggactgtccttctcaccgattacagggggagacggtaatattgagtttctgcttcatttggaatggggcggagaagacggaaacggcgctgaactgccggaagaagacattctccgtaccgtccgcgaagcacatgagacattaaaagccaaaaagacagatgtaccggaataatagggggctattattccttttttctgccatcatgtactttttatcaagaagcggttaacataatgacaagaacagcttgaaaacagaggtgcttacatgacaaaaggccaaaggcatataaaaatcagagagcttattacaagccatgagattgaaacgcaggatgacttagttgacatgctgagagaagaaggatataaggtaactcaggcgactgtctccagagacattaaagagctgcatctcgtaaaggtgccgacgaacaacggctcctacaaatacagcctgccggcggatcagcggttcaatccgctgtcaaaactgaagcgttcattaatggatgcgttcgtaaaaattgactcagcaagccatatgatcgtattaaaaacgatgccggggaatgctcaggcaatcggcgctctgatggataatctcgaatgggaagaaatcatgggcacgatttgcggagatgacacgatcttaatcatctgcaggacgcctgaagatacggagggtgttcaaagccgtcttttggagctgctgtagcgtaattatcagataaaaggtggaatgctgtttgttagctgaactatcaataaaaaactttgccattatagaggaactgacgatttcgtttgagcgggggctcaccgtcctgacgggagaaacaggggccggcaagtcaattattatagacgccgtttccctattagtcggcggccgcggctcgtctgaatttgtccgttacggtgaaacaaaggccgagcttgaaggactgtttcttttggacagcggtcatcccgtttttgaagtatgccgtgagcagggaatagacgcatctgacgacatgattgtcatgagaagggacattaatgccggaggaaaaagcgtctgccgtgtcaacggaaaattagtgacgattgcggctttgagggaaatcggcagacttttattagatattcacggacagcatgataaccagctgttaatggaggacgataaacacttagagctgttggacaggtttgcgggcgctgaggccgaatccgcgcttcaggcttaccatgaaggctatgagcgttatatgaagctgctcaaaaaagtgaagaagctgtcagaaagcgagcaggaaatggcgcatcgattagacctgattcaatttcagcttgaagaaatcgagtcggcgaagcttgaattgaatgaagacgagcttcttcaggaagagcggaagcagatatccaactttgaaaaaatttatgaatcattgcaaaacgcctataatgcgctccgcagcgaacagggggggcttgactgggtcggaatggcctctgcccagcttgaagatatttcggatatcaatgaaccgctgcaaaagctgtcagaaagtgtgtcaagttcctattatctgctggaggatgcaacctttcagatgcgcaatctgttagatgatctggaatatgacccggaacggctgaattttattgaaacccgtttaaatgagatcaaacagctgaagcgcaaatacggagcgacggtagaagacattttggaatacggctccaaaatagaagaggaaatcgatcagatcgagaaccgcgacagccaccttgaagcgctgaagaaggaattggagtcggtcggcaaagatgtggccgtagaagccgccaatttatcaaaaatcagaaaagcatgggctaagaaactggcggaagcgattcatcaggaattaaaaagtctgtatatgggcaaatcaacgtttgatacggaatttctcgtgaaaaccgatccgtcagccagtgaagcaccggttgttaacgggcagcccgtgcagcttacccaaaaggggattgaccttgtgaagtttttaatttcaacaaacaccggtgagcctttaaaaccgctgtcaaaggtcgcttccggaggcgagctttcaagggtgatgctggcgatgaagagtattttttcttcccagcaggatgtcacctccatcatctttgacgaagtggacaccggtgtaagcgggcgggttgcccaagccatcgcggaaaaaatccataaagtatcgaccggttcacaggtgctctgcattacacacctgccgcaggttgccgctatggcggatacgcaccttctgatcgcaaaagaattcaaagacggccggacgacaacgcatgtcacgccgctttctaaacaggacaaggtagcggaaatcggccgcatgattgcgggcgtcgaagtgaccgatctgacaaaacggcatgcacaagagcttttaaaacaggccggacaggtaaaaacgacaggataagctgctgatacaggcagcttatttttttgttccatttctctaacagtgtatccaatgtttttcttcatatgccggttataaatcaagcgcaggaaggcaaaagtatagatgtagcagaaaaagaaagtggtgtgggataggagcgaggagagtgaaggaatgaatgcacgataacatgaggaaagcaataggtgtaattctccttgtttctttactaagtgtaggcttttttaagccatttaaagaatatttactgataccatcagaaatgagcgtctttgaaaaccagacacaggccgttccggttaatgcatcaataagcgctgaaaagggcgaattatcagaagcctttacgctgaaagaagagcacggccatgcaaacataacagggcaaacacatggccggtcagaagtagtatatgatcttgccggatttcccattaaaaaaacgaaagtgcgtgtccttccagaattgaaggtcattccgggcggacagtccatcggtgtaaaactgcattcagtcggtgttttggtggtcggttttcaccaagtgatgacaaaggatgggaaaaagtctccgggagaacaagcgggaattgaatctggcgacatcattattaaaatgaacggacataaaattgaaaaaatgagcgatatcgccccgtttattcaaaaagcgggcaaaaccggtgaatctttggatttattggtgaaacgcgataagcaaaaaatcaaaacaaagctgattccgacaaaggacgaagccgaggggaaatatcgaatcggcctttatatccgcgattccgcagccggcatcggcaccatgacattttttgaaccgaaaacaaaaaaatacggcgcattgggccacgtcatctctgatatggatacaaaaaaaccgattgttgtagaagacggagaaatcgtccgttcaactgtaacatcaattgaaaaagggaaaggcggcaatcccggcgaaaaactggcaaggttttcgtcagaacggaaaacgatcggcgatattaaccgcaacagcccgttcggcatcttcggaacactgcatcagccgattaaaaacaacatttccgacaaagcgcttccgattgctttgtcaaatgaagtaaaaaaaggacctgcgcaaatgctgacggttatcgaaaacgataaagtagagaaatttgatattgaaatcgtcagcaccacgccgcaaaaattcccggcgacaaagggaatagtgttgaaagtgacagatccgaaactgctgaaaagaaccggcggaatcgttcaggggatgagcggaagcccgatcatccagaacggaaaggtcgtcggagccgtaacccacgtatttgtcaatgatccgacaagcggctacggcgttcatatcgaatggatgctgtctgaagcgggtgttgatgtttacgggaaagacaaagcaagctgactgccggatgatccggcagtttttttatgtgatgcgttcttcacttctttcctggattcatgtaaaataagacatgaagatttttcgacaaattcacgtttcctgatttgtcaaacttaatttttagtcgaaaaacctagaaaatgctagaaaaacaaagatataccactattattggtaaatatggattttttaaaaggggaagtagtggttttgtcgaatgtaacatgtagcagtcaaatgggttgcgtcctgttaatacattgggggaggaagaaacgtggagaaaattaaagtttgtgttgctgatgataatcgagagcttgtaagcctgttgagtgaatatatagagggacaggatgatatggaagtgatcggcgttgcttataacggacaggaatgtctttctttgtttaaagataagaatccagatgtgctcgttttagacattatcatgccgcatctggacggacttgcggttttggagcgtctgcgggaatcagagcttgagaagcagccgaacgtcatcatgctgacggcattcggtcaggaagacgttacgaaaaaagccgtcgatttaggcgcgtcctatttcatcctgaagccgtttgatatggaaaaccttgtcggccatattcgccaggtaagcggaaatgtcagcagtgtcacacaccgtgcgccgtctgcgcaaagcagcattatccgcaaccagcctgagccgaagcggaaaaatctcgatgccagcattacaagcattatccatgagatcggtgtgcctgcccatatcaaaggctatctttatttgcgtgaagccatttccatggtgtataacgatattgaactcctcggcagcatcacaaaagtcctttatcccgacatcgccaaaaaattcaacacgactgcaagccgtgtagaacgggccatccggcacgccattgaagtcgcatggagcaggggaaatatcgattccatttcttcactgttcggatatacggtaagcatgacaaaagcaaagccaaccaactcggaattcatcgcgatggttgctgacaagctgagattggagcataaagcttcgtaacgcaagcttttggctagatgtctttttcgcgccttctattccgtgcatgaacgcggaagagaaggcgttttgaaattttgctggcgaaaacaatggaaatcattcatgccggtacttgttctatacataaatgcgggatctatgccgtctacacgtataataccggagctgatattttaatgattttgccgtctctaaaataaaagcgggggacgcggcggcttaacacagataagacttcgtagctgatcgtaccgagcatttcggcaatttcatcaacggaaatctcggctccttgttgtttaccgtagatgacgacttcttctccttgtttgccctcattctcacctaaactgaccatgatcatatccattgtcactctccccgccaccggcacccgtctaccgcggtgaagaataaacccgcggttggacagggcgcgggagtaaccgtcaccatagccgatcggaatcgtcgcgatgatttcacccggttcggcgatatatgtggcgccataactgacggtccggggatctttcaccatggctttcacataagcgatacgcgcctttaaacttagtgcgggtgtgagatccacgaggttcagttcctttatcgaggcggacggatataaaccatataacccaatgcctaaacggatcatgtcggcgctgaattccgggaatgcgatagcggcggctgtattgcacatatgcacggtaggcagcgtaatgtcttgattttttaaaaagcggagaaagctgataaacttttcgtgctgcagcatcgtcagctcagtgtccggttcatccgctgttgaaaaatgtgtaaagatgccatcccatgacagatatgtactcgacttgagcgctttcaccactgctaaaagatcttcttccgtacgcacacccagccggcccattcccgtatccacattgatatgaatggacagccgtttcgaatctgcttctttttccaatatccgattcgcttttttgatccagctgacttgaaacgctgataatgttatgttccaaacggcagattttttcacacagctgagagctgtgaagccgagcacaagaataggtgccgtaattcccgctctccgtaacacaattccctcttcgacgctggcgacagcgagctcgctcgctccgctttccagtgcctgccgcgctacttcaacagagccgtggccataagcgttcgcttttacgacggccataattttagacgtattcggaatatggcggcggatcgcccgtacgttcttttttatcgcatcaaggtcaacttcaatccaaacttcccggcaaagttttttcatcacgattccttctttccttaatgagattcagtactcatgctttcaatctgcattctattcatctttaactgaaatcattcaaaacatggaaaggtgatcgctgatgtttaaaatcaagttttcgggaaatcagtgtgcctgctttatttatgcagttagggctgcttggcagcccttaaattgactttacaatattctgatctgaaaattgatgttcaaacattttggactggcttacagcattgttttgaatgacaatgccgatatttccccctccggcaccgaaaacggtttttgatgcagtcagcggactgatggatatggcgccgccaacattgacaactccgtttcctgatacgttgtttatcgtaatcgggcaaccgctcattctattttttctcctttctctcacagtctactaactatatgtacgctgtgatatggaataagattaaacaaaacggcaaaaagaatccggctgctgccagccggaaagggagggaaatacggatgtcatagtgttttcgttacattttgatcagagtattgagagcttgaagattgagatgtgctggattgattcatttgcaggaccatccctgtatttcccccacctgagccgtagacggtttttgatacggttaaaggacttatcgaaaacgcaccgccgacattgacaaccccgtttccggaaagactattaatcgtaataggaaaaccagccatcatatacggtctcctttctattaatctatttactatatgtacgctgtgtgttagaaataggagtaaacaaagcggtaaaaacttgtgaatcaaaaaaactgccggacatccggcagttttttagtctacttttcaaacggcacccagccgcctgtattctgaatcatttcccataacggttcaggaagtcggtatttctcaatttcagatgcttgaatggctttttcgatttcctgttcgcggccttctttgaccagcaccgcccattcggggttaatcaaaatgacacgtcccagagccaccagcggaattccgctttctaatacagcaagcgcttcgtccgcggtatagatggaaccgacggccatcagcggcactttatggccgacgcgttcgtttaataaatccatccgcgtccgtgaagtatccgccccgcggcgggctttggaattgacatccatcagtgaaatatgcagataatccaagttctcttctgcaagcgcgtcggcgagcatgaatgtttctttcattgtaagccccggtgtttccggctcttccggtgacaggcggtagccgagaacgaatggattttcagcgtgtgtatcaattgcctgtttgacagcgtcaacgactgcaagcgggaacgcaaggcgcttttcatcgcttccgccccagcggtctgtgcgccggtttgttttcggtgaataaaattggtgaatcaggtacccgtttgccccgtgaatttcaacaccgtcaaagccggcttcaatcgctctgcgtgtcgcttcgccgaatgctttcacgatgtgctcaatttcttgttcggtgagagcccgggacgtttgtctcccgtcttcttctgagccgctcgggctgacgacgtcgttgtttggcacgagttcaggagggcattccaatcctccgtggtgaatctgcacaacggctttcgctccttgagactggatcgcctgagcgagttttttcaagccgggaatgtgagaatcatcatagatgccgggctggcctggaaacgctttgccgtccggcgttacgtttgcacatgccgtaatgaccatgcccatttcttttgaacggggagtaatgtagtttaattcacggtcggaaatcgttccgtcatcatttgatgaatagtgtgtcatcggtgcgactgaaatacggtttggtatagtgacgccgctttcgaacgtaaaaggttcaaacagcggtttataagtttgcttcatcatttcgccttcttccttaggagtttaactcgtccgtattctagcttatgttttaattgtgtgcaattattttgcttgttcttcttcctgaggttatgatcggctgaaccatttaaacgaatgaaacggttttctccgttccttttcaggatctttatatcctcctgaaatttgatggccgatcgagctgaatatgacagcggcggcgaagaggagaatgatttttttcatatacatatcttctttcttatcttttacaaggttatttataagcatacgcttgtgcgaaaaaaccgtcaatttgtttttatttattcttttttccactttcctgcggcgaatatcgttccgatctgaatcacaacacttaacagagcgcacactgccacaactgtgttgctgtccatagaagacaccctcctttttgttaggttgatgtatcatatgacagctgtctctgttttgacaaaaccgtaatgcggtgtttcatatttttcaacacaaaaagggcgcttttttaagcgcctttacttttttttcagccggttcaaagcgatttgaacggcgatggcgtcatccaggtagccgatcggaaacatgtaatccggaatgacgtcggtcgctaaaatataatacagcagcgcgctcccgagaatcgcgcggtcttcagccggtgttgattcatccatatactgatgatgcatgtttttcaaatgatcaataaaagggccgacgctttcttcattgtccattttcttttgaaactcatcgcaaatcaggcgatggccctgctgggttttggcatattgttcatatctggtcagttcgcgctcaatttgctcccgggaaaaaggctgatcaaacatctcggccatattcagcatatcctgaatcgcgtgcatcgggtcttgcggcgcagcttctttttcatggccgatgtctatgcctgacgcctcaagcaattcctccagcggggtgcggagatgttttgaaaattcctgaagatgctttaaattggccttctgcttgccgtttataatccgggagatggtggccgtatcaatgtttgttaaggcgccgagttttctcatggagagcgagtgcttatcaagcagtgattttaaaaggggccccagtgtcgtatttttattttctgtcaagggtgtcacctcgtttccgccggaatgatgatcattaatcaataatttttgcagaaaaggtaccttttctgtgctgctgaataggatagtgtagattcaacggcacaacatgttgaaaagacatcaaagaatggagagaaacgaacatggcttggttattgattttaggtttggcagtgtcctcgagcattgataatttaggagtggggatgtcatacggcatcagaaaaatcaaaatatcgcatgcgtcaaatatgatgatcgcttttatctgttttgtattcagttatatcggaatttatttcggcaaatggatttcagccgttttaccgggctttcttcctgtattgctggcggcatttattttatctgtcatcggtatccgcatcattctgctgactgtgccgagaaaaacagcgcgtgttggcgcgtcagaaaaaaaaggccgttttgccggtctgctgcaaaatccggaggcagcggatgccgacggttcgggagaaatcggtatattggaatccatggttctcggggtggccgtatccgcaaatgcgctgaccaacggattaagcgcggggttgatcgggctttctcccgctgccatttccatcactgcggcggtcggaagctttttgaccatatggatcggctgctcgcttggaaaaaaagccgcgtcattgcgcatcggttcttttcacgtcggacagttcagcacggtgctgagcggagtgattattctcatcattgccgccaatacgctgctcttttaagttgtcccgttcattttatgaaaagctcaaaataaatatgaatgtttctattcgggagagcgcatgacgcggctctctttttttgccgatctgatattttttcaaaatgaacagaaagtcgtccgtttccgttaaattctgcatattcagccttcagacagaacctttttcatagactgatcagcttgttttctttctaagttcaggtaaacagcaggtcagatagccttcattccaaatatggaaaagcgctggaggaatgaaggctccctttacaaatcggccattctgttaaaagataaagccgaatgagaaaacgtgaggtgatctgtgtgaagtctgtcatacttctgatcttcaccgcatggctgttatcaggctgcgagtataccgcggaggctgatgcggcgccgtcatttactcaggaaggaacatttataaaaacggccggaaacgatacgatcgcggtcgaaattgacggagaaaggcaagaggtgaaggtgcctttcgctaagcggtttgaatgtcagtctctgcctgaacatacggcggtgcaaatcacctataaaaaagagagcaacggacaattacggcttgaggaactgaaaaaagaaacagatatgtgaaaacggggaggaaaaaaacgtgggtttactgacaaaaagcgctgctgccttcggtgccgctcttcttctgcttgcgccgtctgcttatgcagctgaacctttgcaagggaaaaccatttatatcgatgccggacatggcggagaagacagcggggccggcggaaatggactgcttgagaaaaacatcaatttagcggtgtcaaacaaggtaatcgccaaattggagacagaaggcgcaaaacctgttgcttcaaggactgacgatacttttttacggttggacgagcgggtggcgaaagcaagcgccagccaatccgatttattcgtcagcctccatacgaattcagccgtatcaacggcatcgggcacggaaacgtattttaattcgacatatgaaggagcagacagcgaaaggcttgcttccgacatccagcagcagcttgtcacgtctttagggatgagggacagaggcgtaaaagaagctcctttttatgttattacatattcaaagatgccgagtgtgctggctgaattaggttttatcacaaatcctcaagatgcggacaagctgaaaagcgataacggacaagagcacgccgcggacgccgttgtaaacggaatcgaaacctattacagcggacggtaattataaaatatgtgtaaatagcaccctccttatgtgcataacgattataatagagaaaaccgatgacaaacacctgaggtgacacatatgacgaatatttttgcccaccggggggcgtcgggcgactgccctgaaaatacgatgcccgcattcaaaaaagcgattgaggacggggctgacggaatcgaacttgatgtacagatgacaaaagacggccggatcgtggtcattcacgatgaaaccctcgaccgcacgacgtctttgaaaggatttgtgaaagatacggcgtatgacaaaatcagaaccgccgatgccgccggaaaatggaaagatgcttttaaaggtgtcagaattccgcttttgtcagatgtgctgcgttttgcggaacgtgctgattttctgataaacattgagctgaaaaacagtgtattccgttacgaaggaatggaagaagaagtgattaaaaaagtcagatattacggactggaaaagcgcgttattttttcttcatttaatcatgagagtctcgcggtttgccacgccttggcgcctgaaattgaacgggcggtgctgacaatggatgtgctgtaccggcctgaacggtatcttgccgccattcccgcttcaggttatcatccgaagctcggtacgccggcggtgagcgctgaagtgatcaaacatcttgcaaaacaccaagcggcgctccgtccgttcaccgtcaatcgtcccgaggatatgaagcagctgatgaaagcgggagcagacgcaatttttaccgattatccaaagctggccgtttctataaaaaaagaatgccgcagctgagaagactgttcagacagtcttctttttttatgggcgggaaaaaggcggtgcactcataactcggtcagccggttcatatattgtaacagggcgttttgtgtaagcgttatcttttatcttattgaaagtgaggcaaaattgtgggaaaaacggttatcgtcagtgcggcaagaacgccgttcggaaaatttggcggcgcattaaaagaggtaaaggcagccgagcttggcggcattgccataaaagaagcaatcaagcgcgccgctatcagtgaaagcgaagcggaaggagcggtgatgggaatggtcgtccaggcgagtgccgggcagataccggcacggcaggctgcaagatatgccgggcttccgtggtccgttccggctgaaaccattaataaggtctgtgcatcggggctcagggccgttaccatctgtgatcaaatgatccgggcgaaagatgcggacgtgctgattgcaggcggaatggaaagcatgagcaacattccgtacgccattccggccggccgctggggtgtgaggatgggggacggggtgtttcaggatttaatggttcatgacgggctgacctgtgcgttcgaccaggtgcatatggctgtccacggaagcactgcggccaaaaagtacggcatttcccggaatgaacaggatcattacgctcttttgagtcagaaacgcgcggctgaggcggccgaggcgggcaaattgcgtgaagaaattgtccccgtcacctggaccggcaaaaagggcaaacagcataccgttgaagcggatgaggggctgcgccctgatacgagccttgagcagcttgcagcgctcaagccaatttttacagccgacggaacggttacagccggaaacgctcccggtgtaaatgacggggccggagcatttgtgctgatgtcagaggaaaaagccgcgaagcagcatgtcaggccgctcgcagcgatacttggctttgcgtccgtcggactggaagcgtccgagctggcaagcgcgccgggagaggccatcagccggctcttgacaaaaaccggactgtccgttgatgatattgatttgtttgaagtaaatgaagcatttgcgtccgtcgtgctcgtgagtgaaaaaatagccggggtcagccgggaaaaagtgaatgtaaacggaggggcaatcgcgttcggccacccgatcggcgcaagcggagcgagaatcatcatgagtttaatatacgaattaaagcgtcgcggaggaggtttaggcatagcggctatatgcagcggagcggctcaaggagatgccgtcctgcttgaggtgtactgatcaaaaggagggagcgacagatgaagatgaaaacaatcatggtcgcaggtgctggtcagatgggagcaggcatcgcgcagacggctgcagaagccgggtttgccgtcatgttatacgattgggagccggaaacggtaacaaaaggtcttcaccggataaagacaaacctggagaaagagcaggcaaaaggacggaagtcacggcaggagacagatgccgttttcagccgtatttccccggcagaactcacagaagcgggagatgctgattttgtaattgaagccattgccgaaaacaaaaaagcaaaagcagaattgtttgacacactagataaaatctgtccccctcatgccgtattggcaagcaatacgtcttctcttcccattacggagcttgccgcggcaacaaaaaggcctgaaaaagtaatcggcatgcattttatgaatccggttcctgtcatggagcttgtcgaagtcatcagaggactcgccacatcggaagaaacggcggaaacagtaaagaagcttgccgtccggatgaataaaacccctgtcgaagtcaatgacttcccgggctttatatctaatcgcatattaatgccgatgattaacgaagccgtttattgcctttacgaaggagcagcttcaaaggaagcgattgatgaggtgatgaagctcggcatgcgtcatccgatgggtcctttaacattagctgacttcatcgggctggatacgtgcctttccattatggaggttctctatgcggggctcggagattcgaaataccgcccatgccctctgctcagaaaatatgtcagcgccggctggcttggcaaaaaaagcgggcgcggtttttatgagtacggcagatgacgtaaagatcatgaggggagacggcagccatgcattttacagaagagcacatcatgatgagaaaaatggtgcgtgattttgcccgcaaggaaatcgcgccgatggttgagttcatggaatcaacagatgaatttccggagcggctgattaaaaaaatgggcgaagcgggattgatgggcattcccgtcccggaagcttacggcggggcgggtgctgatacaacatcttacattttagcgattcatgaaatatcaaaagtcagcgcggccgtcggcgtcattttgtccgtccacacatcggtagggacaatcccgattttgcatttcgggacagaagcccaaaaacaaacgtatattccgaagctggcagcgggcgaatatattggggcttttgcgcttactgagcctcaatccggatctgatgcgggaagcctgaaaacaacggccgtgcgaaaaggcggttcatatattctgaacggttcaaaaatctttattacaaacggcggagcggcagatctgtatctgacattcgccataaccgatccgggtaaggggagaaagggaatttccgcgtttatcattgagaaaaacacacccggtttttctatcggaaaaaaagaaaaaaagctcggactgttaggttccaatactgtcgaattgcagtttgaccaagcggaaattccggttgaaaaccggctcggcgaagagggtgaaggcttttcaatcgccatgaaaaaccttgacgtcggacggatcggcatagcggcccaggcgctcgggattatcgaagcggcgctcggctgctcggtggagtacgccaaaacccgcagccagttcggcagacccattgcttcgaatcaggccgtttcatttaaattatctgacatggcgacgaatgcggaagctgccaaattattggtctatcatgctgctgatctgtatcagcgagggcttccgtgcggaaaagaagcatctatggcgaagcaattcgcgtccgatgcggcgatgaaagcggcggtggaggctgtgcagattcacggcggctacggctatatgaaagagtatcccgcggagcgtttatttcgggatgcgaaagtcacgcaaatctatgaaggaaccaatgagattcaaaggctgattatttctaagtatcttcttcaataaaaagtgcgcaaaggagcgaaaccatggaatcttattctcccggtttagatggcgtcattgcggtggaaacggggatttctttcctggatacacagcagggcagtattttaatcaaaggccacgatctgattgagctttctaaaacggccggctatatggacattgttcatctcttattggaagacagacttcctgatgcgaaagagaaggcggcgcttgaagaagacgttcggcgcggcgggcaccttcccgaggaaatcttgcacatatgccgtctgctgcctgaacatactcacccgatggacggactgaggacgggtttgtccgcgcttggaggctttgacaaggacatcgatgaccgttcatcttccgtaaatcagcaccgcgtacgcggacttataggcaaaatgccgaatctgacggtcaacagctatcgagtcatcaacgggctggagcctttggcgccggtcggaaccttatcatacagcgcaaactttttatatatgattaccggaaaaacaccgtcatctttggaagaagaaatcttcgaccggtcgcttcttttatacagtgagcatgaattgccgaactcaacgtttacggcccgtgtcatcgcttcgacgcaatcggatatttacggcgcgctgaccggagccgtcgcctcgcttaagggaaatcttcacggcggagcgaacgaagcggttatgtacatgcttgaggaagcgaaggatacagacgggtttatacaattattaactcaaaaactcgcaaacaaagaaaaaatcatgggcttcggccaccgtgtctacatgaaaaaaatggacccgagggcgctcatgatgaaagaagcgttaaaaaagctgtctgatctttcaggtgatttccgtctttatcatatgtgtgaagccggcgaaaccgtcatgcgggagaaaaaaggcctttatccgaatttagattactacgcagcgccggtctattacatactcggcatcccgataccgctgtacacgcctatattcttcagcgcgcggacggtcggcctgtgtgcccacgtcattgaacagcacagccgaaaccggcttttccgcccgcgtgtccgctataccggagcgcgcctgtaaacagatgagaaaggaagatgaaaacatgacagaaccccgccgaatggatgctgtaatcgaagagatttctgattacgtgctccatcaggagattgacagttcagaagcttttactacggcaggacatgtgcttcttgatacgataggctgcgggattttggcgctcagctatcccgaatgtacaaagctgctcggcccgattgtcccgggaacctccgtgcccaacggcagcagagtcccgggcacgccttttgttttagacccggtcacggctgcttttaatatcggctgtatcaacaggtggctcgattataatgatacgtggcttgctgcggaatggggtcatccgtctgataatctcggaggcatattggcttgtgcggattatatatccagagtgcggatttcagaagggaaagaaccgcttaccgtgcgtgatgtgctttgcgcaatgatcaaagcgcacgaaattcaaggaattctcgctttggaaaacagcttaaacagagtggggcttgaccatgtgctgtttgtgaaagtggcgactgcggctgtttgcgcacaaatgctgggcggctcaagagaggaaatcaataacgccgtatctcacgcttggattgataattcaagcctcagaacgtatcgtcatgcgccgaacaccggatcacgcaaatcatgggcggccggcgacgcgacgagcagaggcgtatacttggcccttatggcgcaaaaaggtgaaatggggtacccgacggctctgaccgcatctggatggggatttcaagacgtattgtttaaccggcaggaaatgaagcttgcccgcccgcttgggtcctatgtgatggagaatgttttgtttaaagtatcctacccggctgaattccacgcccagacagcggcggaatgcgcggtccggcttcatccggaggtgaaagaccgcatcgaagacattgacaggatcacgattatgacccatgagtcggcaatccggattatcgataaaaaagggccgcttcacaatccggctgaccgggatcactgcctccagtatattacggcaatcgggctgcttttcggagatatcacggcggatcattatgaagaggaaacggcgtctgacccgcgaattgatacattgcggagcaaaatggaggtgacggaacacaaagcgtactcaaaagattacttagacccgaataagcgatccatctcaaatgccgtacaggtgcattttacagacggcacggctacgggacggattgaatgtgaatatccgctcgggcaccgattccgcagaaaagaagccgttccgaagattcttgccaagttttcaacaaacatcagcactcatttttcattgaagcagcagcggaaaatcgaagaggtctgtaaagatagcggccgaatgcagaagcttagcgttaatgaatttatggacttatttctcgtataaaataggagggtgacaaacatgacgtggatcgtcagcaagcagtcgtctcaagaggagcttgcagagcggttccgtacgctgatggcagcgccggatctattgcagattcccggcgctcacgatgccatggccgctcttatcgccaagaaaacgggtttttcggctctttatttatcaggcgcggcttacacggcgagcagagggcttcccgatttagggatcatcacgtcggcggaaatggctgaacgggttaaagatctggttcgctcgtctgatctgcccgtccttgtcgatattgacacgggtttcggaggcgtgctgaatgccgcccggacggcgaaagaaatgtatgaagcgcgcgcggccgccgtccagatggaggatcagcgcctgccgaaaaaatgcggacatctgaatgggaagcagctcgtgccgattgaagaaatggcgcaaaaaatccaagcggtcaagcgggccgcgccgactcttcttgttgttgcgagaacagacgccagacagcaggaaggattggagggggcattaaaaagggcgtccgcttatataaaagcgggtgctgacgctgtttttccggaagcgctccaatcagaaagtgaattcagagcgttttccaaacaaatcagtgtgccgattctcgcaaacatgactgaattcggaaaaacgccgtattacagtgctgatgaattttccgatatgggctgtcagatggtcatttacccggtcacgtcactcagaacggcggccaaggcttttgagcgtattttccgccttctgaaagaagaaggctcgcaaaaagaggggctttcggatatgcagacgagaaaagaactatatgaaacgatcgcttacgatgactatgaagaactggatcaatccattgccaaaacgatactgccggacgactgaaaaagccctttttttgcaagggctttttttacagcttttttttcctgaaccgcgggctgacttgattgcgtttccgatctctgtacagaataaatccggccagaacataaaggccgaacaaaaaaaacgccaatccggccgccccctgaagaaaaagggacggaaacgggaaaaacgcatgcccgaataatgcatctctcatcagcttaatgccgagcgccgcgacagcgccggggaggaccagaatcaaaagcgcaacaagccggctcatattcagaaaacccctttacgatatgttttcctttattgtccaatcgaaaaaatattttgtcaagagatcaaaacgtggtaacataggggttgtgcaaattattgcaacgggaaatacaggtgtgcaaattttttcatataaaggggtatcgggatgcagaaggtgctgattataggtgctggtaaaggaggcacggcgctcctacagattttgatgaaaacaaagctgatccggattattgcggtggttgatcaagatccggaggcgcaagggctgcaagaagcccggagatatggaattgcaacctcatcagattggaaaccctacataactgaagatatagatattatcatccatacaacaggcgataaagcggtcatggatgagctgctccatgagaaaaaagaacaaaccatcgtcatgccgggaaaattggcgtacatggtgtttcagctgatggaggaaaaacagcagcttatccaaatgctgaagtcgcagacgtataagcatgaccggatttttaattcaacgcacgacggcatgatttttatagacgtcaacgaaacgatcattttatttaatcagatggcagaaaaaatggtcggccaaaaacgggaggatgtcatcggccgccaaattaaagatgtagtgccgaacacaaagctgcctcggattctggaaacgagagagccggaatataaccagaagcagcttctcggaaagcacctgcagattgtcacgacaagactgccgatcattgatgaaggcggaaaacttctcggcgcgttatgcgtgtttaaagacatcaccgacgcagttgaactggcggaagaggtcacgaacttaaaacaaatccgcaccatgcttgaagcgattatacaatcatcagacgaggccatttctgtcgttgatgaaaacggcatcggaatgttaatcaacaaagcgtatacaaaaatgaccgggctgtcagaaagcgaagtcatcggaaaacccgcttccaccgatatctcagaaggggagagcatgcacctgaaagtattggggacaaggcggcccgtgcggggtgtgagaatgaaggtcggccccaataaaaaggatgttatcgtaaatgttgcccccgttattgtggacggtattttaaaaggcagcgtcggcgtcatccacgacgtgtcagaaattaaaacgctgactgctgagctgaatcgggcgcgccagattatccgcacgcttgaagcgaaatacacgtttgacgacattatcggcacgagtgaacaaatgctggtcgcccttgaacaggcgaagctcggggcgaaaacgccggcgacgattctgctgcggggagaatccggcacaggaaaagaactttttgcccacgccatccataatgaaagcgaccgaaaatacaataagttcattcgggtcaattgtgcggccctgtctgaatcactgctagaatccgagcttttcggctatgaggaaggcgcgtttacgggcgcgaggcgcgggggcaaaaaaggactttttgaggaagcgaataacggcagcattttcttagatgaaatcggagagctgacccaaagcacccaggcaaagctgctcagagttctgcaggaaaaagaaattatcagagtcggcggcgctaaagcgatttctgtcaatgtcagaattatcgcagcgacaaacgtcaacatcgaaaaggccatggcggaaggcgcgttccgtgaagacctgtattaccggattaaccgctatccgatctcaatcccgccgcttcggcagcgcaaagaagatattgaagcgctgagcattcggctcattgaaaaaatcaatcaggattacggccgcaatgtaaaggggctcacgccgaacgcgctgcgagctttatcagcctacagctggccgggaaacgtccgggagcttgaaaatgttctcggacgggcaatgatatttttagagccgcacatggaacggatcgaacagcagcacctgcctgtttttgaatcagagctgaatgaaaaaaacggcacccaaagtgattttccggatgtggaaggggaaaagctgtctcaggctgttgaaaaatttgaagcgcacgtcattcaaaaaacgcttgaaaagcataaattcaaccgaaccaaaacggcaaaagcgcttggtgtcagcattcggaatctgtactacaaaatggacaagtacggccttgcaaatgacggcatgcaataaattgcagagaaagcgcaaacagctgcatgctttcttgaaaaaagccggaataaaccctcacgcacatttggcacggaacttgcattgttaaaagcggattcgcacaaggaaggtggtacaaaatgaagctgagagacctagttgaaaaagccgcggcaaaaaacgcaaaaaccattgcagtggcccacgcagcagataaagaagtgatccaggccgtcaaaatggcggcagaacacttgtcggcacgatttttactgacgggtgacagcggaaagctgaaagagcttctggcaaatgagccgaagttcaatgctgaaatcatccacgccgattcacccgaagaatctgcggcaaaagcagtgcgcgcagtgcgtgaacaagaggcggacgttttaatgaaagggaatcttccgagctcaactcttctgaaatcggttttaaaccgccatgaagggcttcgttcaaaaagggtgttatcacatgtagccgtttttgaggtgccggactatgaccggctgatgtatgtgactgattcagcgctgaacattgccccgtctcttgaagagctcgggcatattctgcaaaatgcggttcatgtcgcacattcagtagggaatcctatgccgaaagccgcagtccttgccgctattgaaacggttaatccgaaaatggaggcgacgctgaacgcggctgcgatcgtccagatgtgcaatagaggacagattaccggctgcattgcggacggaccgcttgctttggataatgccgtatcccaagcggctgcgctgcaaaaagggatttccggaagcgtagcgggccaggcggatattctcttggttccttcaatcgaggccggaaatatgctttataagtcaatgatttattttgcgaaagcaaatgttgctgccgtcatcgccggtgcaaaagcgccgatcgcattaacgagcagagcggataccgcagaaaataaactgtattcaattgcgcttgcgatttgcgcatcacaagaacagtaggaggaacgaacctatggaaatttttaaatatatggagacttatgattacgaacaattggtattctgccaagatgaacaatccggattaaaagcgatcatcgcgattcatgatacgacgctcggccccgcactcggcggaacaagaatgtggacatatgacagtgaagaagcggcgattgaagatgcactaagactcgcaaaaggcatgacttataaaaatgcggctgccggtttaaacttaggcggcgggaaaaccgttattatcggagacccgcgcaaagataaaaatgaagaaatgttccgcgcgttcggccggtacatccaaggcttaaacggaaggtatattacggcggaagacgtcggcaccaccgttgaagatatggacatcattcatgatgaaacagactatgtaaccggaatttctccggcattcggttcatcaggaaatccgtccccggttacggcgtacggcgtctacaaagggatgaaagccgcagcgaaagcggcgtttggcactgattccctggaaggtaaaacaattgccgtgcaaggcgtgggaaatgtggcttacaatctatgccgccaccttcacgaagaaggcgcttctttaatcgtaacggatatcaataaagaatctgttaaacgtgccgttgaggacttcggcgcccgcgcagttgatcccggcgacatttactcacaggcgtgcgatatttatgccccatgtgctctcggcgccgtcattaatgatgacacgattaaacagctgaaggcgaaagtcattgcgggagcggccaataaccagctgaaagaaacacgtcacggcgataccattcatgaaatgggaatcgtgtacgctccggattatgtcatcaatgcaggcggcgtcatcaatgtggccgatgagctttacggctacaatgctgagcgggctttgaaaaaggttgaaggcatttatgcaaacattgagcgggtgctcgatatttccttgcgtgacggcattccgacatacttagcggctgaccgtctggctgaggaacgaattgagcgcatgcgccgttcaagaagccagtttctgcaaaacggccaaagtatattaagcagacgataggaatttgatctggaggtatgaaaatgttcgaaaaggaaaaacgcattctcattctgaatccaggctcaacatcaacgaaaatcggtgtctttcacaatgaacgctgtatctttgaaaagacgctgcggcatcccgaagaagagctgaaaacatttaacagcatcatcgaccaatacgaatttcgaaaaataagcattcttgagtctttgcacgaacagggcatcaacatttcaaagttcgatgccgtttgtgccaggggcggtctgctcagaccgattgagggcggcacatatgaagtgaatgacgccatgatcactgatttgaaaaacggctacaacggccagcatgcttctaatctgggcggaattattgccagggaaatagctgacggattaaatatccccgcgtatatcgtcgatccggtcgtggtggatgagatgactccgctcgctaaagtatcaggaatgcctgaaatcaagcggaaaagcattttccatgctttgaaccaaaaagctgttgcccgtcaggcggcggcgtccctcggcaaacggtatgaacagatgaagatgatcgtcactcatatgggcggcggcaccacagtcggtgtccatgattgcggacgggtgacggatgttaacaacgggcttcacggagaaggacccttcagcccggagcgcgcgggaaccgttccggcgggtgatttggtggaaatgtgtttttccggcaagtattcaaaagccgatatgatgaaaaaacttgtcggcacgggcggactctccggctacctggggacaacggacgcggtgaaggtggaaaaacgcattcaggccggagatgagcatgcgaggctcatttatgacgcaatggcttatcaagtagcaaaagaaatcggggcggcaagcgccgttttaaaaggaaaagtagacattatcgtcctgacgggcggattggcgtacgggaaaagtttcgtatccgccatcagatcgtacatagattggatttcggatgtactggtgtacccgggagaaaatgaactgcaatctctcgcgcaaggcgcgcttcgggttttagccggtgaggagcagtcaaagcaatatcagatcggcgaaggagtgaaaacaaatggcgactgagtatgatgtggtcattctgggcggcggcacgggcggttatgtagccgccatcagagcggcccagctcggcttaaaaacggccgttgtagaaaaagaaaagctcggcggaacatgcctgcataaaggatgtatcccgagtaaagcgctgttaagaagcgcggaagtgtaccgaaccgcaaaggaagcggcagcattcggcattgaaacggaaggtgtctccctccgctttgacagcgtgcaaaaacgaaagcagggaatcgttgaccggctggccggcggtgtcgcccacttgatgaaaaaggggaagattgatgtattcaacgggtacggacgtatgctcggaccttccatcttctcacctcttcccggtacggtttccgtcgaatacgcaaatggtgaagaaaacgacatgctgataccgaaacaattgattatcgcaaccggttcaaggccgaaaatgctgccgggtttagaagcagacggtacatatattctgacatcagatgaagcgttagagcttgaacgtctgccccaatccatgatgatcgtcggcggcggtgtcatcggaattgaatgggcatccatgctgaacgatttcggcgtcaatatcactgtgattgaatatgcggatcgcattttgccgacggaagaccgtgatatttcaagcgagatggaaaaactgttaacgaaaaaaggaattaagatcgtgacgggtgcgaaagtgcttccggatacattggaaaaagcggacggcgtttcaattgccgctgaaaagaatggaaaaaaagaaacgtatcacgcggaacaaatgcttgtttccatcggccgccagccgaacattgaagggatcggacttgaaaacacggatattgaagcggaaaacggttctatcatcgtgaacgaagccgggcagacgaaggaatcgcacatttatgcgatcggtgatgttgtcggcgggctgcagcttgcgcatgtggcctcccgtgagggcatcattgccgttgagcatatggcgggtcttaatccggctccgcttgatgccgctcttgtgccgaaatgtatttattcaaatccggaagcggcgagcgtcggtctgacagaagaggaagctcttcgaaaagggcatgaactgaagatcgggaagtttccgttcatggcgatcggaaaggctcttgtatacggagaaagcgacggctttgtcaaaatcgtcgctgatcggaatacagatgatattctcggtgttcatatgatcggcccgcacgtcaccgatatgatctctgaagcggggcttgccaaggtgctcgacgcgacgccttgggaaatcggccagtccatacatccgcatccgtcgctgtcagaagcgattggagaagctgcgttagccgcagacggaaacgcgattcatttttaaaaggaaagaaggaggggtttgaatgactacaaaccgccatcaagcattagggctctctgacgaagaagccgttgaaatgtatagaaccatgctgttagccagaaaaatcgacgaaagaatgtggctcttaaaccgctcgggcaaaattccgttcgttgtttcatgtcaaggacaggaagcggcgcaagtaggcgcggcctatgccttaaaccgtgataccgactatgtgcttccgtactacagagatataggggttgtgcttgcattcggtatgactgcaaaggatttgatgatgtcgggttttgcgaaagcagctgacccgaactcaggcggaaggcagatgccgggccacttcgggcaaaaggaaaacagaatcgtaacgggctcatcccctgttacgacgcaggttcctcacgcagtcggaatcgcgcttgcgggacgcatggataaaaaggatatcgtctctttcgttacctttggagaaggatcttccaaccagggggattttcacgaaggggcaaactttgccgccgtgtataaactgcctgtcattttcatgtgtgaaaacaataagtatgccatttctgtcccgtatgacaaacaggtggcgtgcgagaaaatatccgaccgggcggcaggctacggcatgccgggagtcactgttgacggaaacgacctgctggaagtttaccgggccgtaaaagaagcgcgcgaacgggcgtctaaaggcgaaggccctacattaatagaaacggtttcctaccgtttgacgccgcattccagtgatgacgacgacagcagctacagagaacgcgaagaagtagaagaagcgaagaaacaagatccgcttcttttatacaaagcatacttgcaagaagccgggcttctaggtgaagaagaagaaaagaccatgctggatgacatcatggctatcgtaaacgaagcgacagacgaagcggagaaagcgccatacgcatctcctgaatcaacgcttgatcacgtttatgcgaagtagggaggaatacttatgtctgtaatgtcttatattgacagtattaatgcagcaatgaaagaagaaatggaaagagatccgcgcgtttttgttctcggggaagacgtcgggagaaaaggcggcgtgtttaaagcaacggcgggtctctatgaacagttcggagaagagcgggtgatggatacgccgcttgctgaatcagcgattgccggtgtcggcatcggcgccgcgatgtacggcatgcgcccgattgccgagatgcagtttgccgatttcattctgcctgcggtcaaccaaatcatttcagaagcggcaaaaatacgctaccgttcaaacaatgattggagctgtccgatggtcatcagagcgccttacggcggcggtgtgcacggcgcgttgtatcattcccaatctgtggaggccatttttgccaaccagccgggccttaaaattgtcatgccttcaactccttatgacgcaaaaggactgttgaaagctgcagtccgtgacgaagatccggtgctgtttttcgaacataagagagcgtaccgtctgattaaaggcgaagtccctgcggatgattacgtccttccgatcggaaaggcggatgtaaaacgcgaaggcagcgacattactgttattacgtacggattatgcgtccattttgctctgcaggctgccgagcgccttgaaaaagatggaatttccgcacacgtattagatttgcgtacggtttatccgttagataaagaagccatcattgaagccgcgtctaaaacaggaaaagtattgctgatcacagaagatacgaaagaaggcggtattatgagcgaggtcgccgccattatttctgaaaactgcttatttgatttagacgcgccgatcaagcggcttgcaggtcctgacgttccggcaatgccttatgcgccgacaatggaaaaatacttcatgatgaatcctgacaaagcagaagccgcgatgagagaattagcggagttttaaagacgtaaggaggtttttgacatggcgattgaacaaatggctatgcctcagctcggagagagcgtgacggaagggacgattagcaagtggctggtatcccccggtgatcaagtgaataaatatgaccccatcgcggaggtcatgacggataaagtgaatgcggaggtgccgtcttcttttaccggtacgattacagaacttgtaggagaagaaggccagactcttgcggtcggcgagatcatctgcaaaattgaaacagaagaaacggaaaccgaagtggcgccgaagcgggaagaagagcagaatagcccttcagacactgatgcaaaccgtcaaggtaaagatcagtcaaataaagcgcgttattcgccggccgtgctcagattagcgggagaacacggcattcagcttgaaaaagttgaaggaacgggtgcaggcggaagaattacgcgaaaagatattcaaaagatcattgattcgggaatgaagcagaagtcggaagcaccggcgccggctgccgttcaaacaacgcaacaagcgccgaaacaacagcaaaaacaagcgccgcaacccgctctgtcagccggtgatattgaaattccggttacaggcgtcagaaaagccatcgccgccaatatgcataaaagcaaaacagaaattccgcatgcgtggacgatgatggaagtcgacgtcacgaacatgacggcgtacagaaacagcattaaagactcatttaaacagaaagaaggcttcaatttaacgtttttcgctttctttgtaaaagcggcggcgcaggctctcaaagagttcccgcagatgaacagcatgtgggcgggggacaaaatcgtccaaaagaaagacatcaacatctccattgccgttgccacggaagattcgctgtttgttccggttattaagcatgctgatgaaaaaacgattaaaggcatagccagagaaataacggatcttgcgaaaaaagtgagaaacggaaaacttaccgcggaagatatgcagggcggcacatttaccgtcaataacacgggatctttcggctcagttcaatctatgggcattatcaaccatccgcaggcggcgattcttcaggtagaatctatcgtcaaacgtccggttgtcatgaataacgggatgatcgccgttcgtgatatggttaatctttgcctgtctttagatcacagagtgctcgacgggctcgtgtgcggccgattcctcggacgcgtcaaagagatcttagaaaacattgatgaacatacttccgtctattaaaaaaactccttttgcccgggcggcaaaaggagcttttttattttcattgtgaatcctcgggaacaagcatagtgagatgatgttttttcacttcgatcgtacaaggtgttgttccgtatacctcgccatctgtatccgcgtccatctcacgtgcggtttcgatttcaatcctggatgcctgaatataggacagctcccctttgaaatcatcaaacgaaccctgctccatcgtcatcagctcccgcagcgcggcaaggcttgtgttgcggcagattaacacatcggctaagccgtcctggaggctggcatcaggcaggggaactctgtttgtcccgatataatgcccgttcatgacaagcaccattacggcttcgtcttctttcacctcgccgtcaatcgtcaatttgacaggaaacgggttcgcgcttgtcatcgtccgcaaggcgctcgtgaagtagctgattttaccaagccatgctttttcagtttcattaatatggcttgatgcttcggtgatcagtccgatgccccagaagttcagaaaatagccgtcatccgttttacagacgtcaatcatccgtttatgtccggccgcgagcgcttcagcggccttttgaaggttttgcggggtgccgagcgcccgtgagaaatcgttgcacgttcctcccggcaaaatgccgatagcgggtctgtgatcaagcttgctgatgctgttgatacattgatgcacagtgccgtctccgcctaaaatatataaatggtcaactgaactgtcgagattttcacaatactgacgggcatcatcctgatgtttggtcggtttaatcaaaagttcatcagctgactgggccaaaatggggacgaccgtgccgagcgttttatcaatttgtttttgaccggcgtttccgttataaattaaaactgctttccgttggctcatatgactgctcctttatttcagacaatctccttaacaagtttcccgtttttaaagggtcataaacttacatcgggaacataaaagggacaaaaaacaattggatatgagcggtgtcatttgccgatagggaggttccttgctatcataagaagagatgatcaaaaaggagatgtcccagttgaatatggattttaatttatttatgaatgatgtcgtgcgtcaagcccgccaggaaatcacggccgccgggtatacagagctgaaaaccgctgaggaagtggacgatgcgctttcgaaaaaaggaacgacactcgtcatggtcaactctgtgtgcggatgcgcaggcggtattgcacggcctgccgcgtaccattccgtacattacgataaacgcccggatcagcttgtgacggtatttgccggacaggataaagaagcgacagccaaagcgagagaatactttgaaggctatccgccgtcctctccgtcatttgccattttaaaagacgggaaaatcatgaaaatggtggaacgccatgaaattgaaggccatgagccgatggccgtcgtcacaaaactgcaggaagcatttgaagaatattgtgaagaagtataagtgaaagaaaaaccccggagccaagcgggactgacccccgtttttgagacagggatcaaaacacctttaagcagccagctgtcggtatgtgaccggcggctggttgtttagtttcgtttgaatacgaatgttgttataatagtatatataggtttcgacagtttgctctacgatggtcgtcgtagtgctttccaacctgtcgaggtagaacgtttcagactttagtgaggaatgaaacgattcgatggaggcattatcagcgggtgtccctttacgggacatgctcatggtaatgccttttgttttaacagctttctgatactcataagatgtataaacagaaccttggtcactatgtaacacgcagttctctggcagtacgggcagctgatcaagtgtgtgtaagacaaaatctgtgtcctgtctatcgccaatcgtaaaagcaatcacttctccattgtataaatccaatatactggaaagatacaattgtttctgcccataaggcaaatatgtgatatccgttactagcttttccagagggcgatcagactgaaagttccgatctaatatattctcggccacggcatatggctgcccattcttcttgcgctttttcaccttaacccggcattgccactgatttttctgcataatgcgctgaaccgttttatgattaatacgcattcccttttttaatatggctgtgattttccgatagccatatcgatacttgtgttctcggcacaacgtgccgatttgtttttctaaatggtatttagggttatctttcatcagattcttcttccaacgataataagatgctcgtgagatacctaaatgaatacagatatcctttatgatcattgtgctgcgcaatgcttctacaagctcgactggcgtttcgctatcagcttcctttccaattcgttgtacttttttaacacttcattctgttgtctcagataacgattttctgcctgcagtttctctaattcggaagaatactctggaccttttccataagaatattgctttccgacaggttgttcgaatcgatgtgtgtccccagctttataccacctgacccatgtctgcacctgcgtcttattctttatattcaattcctgcatgatctccttcacaggcacgcccgccaatctcatttctacagccttctgtttgacttcaaccggataactcactcttgccctcatagaaaaacacctccaagtctaatttcggataacaacgatccgttttcaaacttgaaggtgttttttgtttgtctcatattatggggtcagtcccaagcgcttgcggggtttttttatatggcatctgtataaatataaatatttatacatcggcgttcagctgtcactaacttgaaaaacaatgactataataaacacagaaaggaaaatatatttttcaaaaatagtattgcatcacaattaaaaagtgtttaaaatacaagttaacgaataaatattcaattttaagagatcagtagatatgggggaaatgaatcatgaagaaatggctgttggtattagctgccgcatgtatcacctttgcgctgtccgcctgcggatcaggcaattcaggctcagagggcggaaagaacaagctgattatgggtacatcggctgactataaaccatttgaatataaagacggcgatcagatcaccgggtttgacgttgatctggcaaaagctctgggcaaaaagaccggctatgacgttgaggtgcaggacatggacttcaacagcctgattacagccttgaagtccaagcaggtagatatgattttatctggaatgacacctacgccggaacggaaaaagcaagttgatttttctgatatttattatactgctaacaatatgatcgttacgaaaaagggaagcagcatgaaatccctgaatgatctgaaaggcaaaaccgtcggtgttcagctcggctccattcaagaagaaaaaggcaagaagctcgcttcgaaatacggttttcagctcgaagaccgcaaccggatctcagacttgaccgaagagatcaaatccgggcgttttgatgccgcgattatcgaagacatcgtagcacaaggctatttcagttcaaatcaagatctgcagggctttgcgtcagcagatgcgaaatcagacgaatcgggttccgcgattgcgttccgcaaagacagtgatctgacagcgaagttcaacaaagcgctgaaagaaatggagaaaaacggagaaatcgaaaaactgaagaaaaaatggttcaccaacgagaaataaaagaaagctcaacttttcgttgagctttttatcttgaataaagacaaaggagatcacacttatgaatttggatttctcagcgacaatcccccaaattccttttatattggaaggccttgcggtcacattgaaaattgtgctcgtttcggcggtcatcggtcttgtattaggcatcgtgctcagcttatttaaaatcagcacgatcagtccgctgaaatggattgcggatttttatacttcgatattccgcggcacgccgctcgtgctgcagctgatgatcatttatttcggtatgccgcagcttctgggctttcagatcgatcaattttgggcggcggtcaccgcattatcgctcaattcagccgcttacgtctctgaaattatcagagcgggaatcaacgcaattgacaaaggacaaaaagaggctgccgtcgctctcggcgtgccgtacggaaaaatgatgaaagatctgctgctgccgcaggcgtttaaaaacatttctccggctattattaacgaattaatcaccttaacgaaagaatcggcgatcgtcacagtcatcggtcttggcgacattatgagacgggcctaccagtccggcgccgcaacatacaactatttagaacctcttattgtggcgggcttaatctattacgtgctcgttttgatcttagcattcatcggaaaaggcgtagaaaggaagctgaaagccaatgattaaggtcgacaacctgtcaaaatcattcgggaaacatgaagtactgaaaaacatttcaacacagatcgaagaaggggaagtcgtcgctgtcatcggcccttccggttccggcaaatcaacgtttctgcgctgcttaaatctgctggaaaccccgagcggcggaacgattgccattaaagaaaatgaaattaccgcagctaaaacgaataaactgaaagtgcgggaaaatatcggcatggtatttcagcattttcatttgtttcctcataaaacggtgcttgaaaatatcacatacgcgccggtcagcgtgaagaaagagtctaaaaacgaggcggaggaaaaggcgtgcgccctccttgaaaaagtcggactgcttgacaaacggaacgactatccgaaccgtttgtcaggcggacagaagcagcgggtcgccatcgcgcgggcgcttgccatgaatcctgacatcatgctgtttgatgaaccgacctcggctcttgacccggaaatggtcaaagaagttcttgaggtgatgaaagagctcgcgcagacgggcatgacgatggtgatcgtaacgcacgaaatgggatttgccaaagaagtggcagaccgcgtattatttatggatgaagggacgatcgtggaagacgggcagccggaagaattttttctttctccgaagtcaaaaagagcacaggactttttagaaaaaatattataaaatataactggaagaaaagaagaagaatgctcttcttcttttttttgagaaagaaacaaacagaatggagcaagcaatgtttaaaatcggttaccgcacactaaagaccgcacttggaacggcgctggccatttatttagcccagctgttgcatctgcaaaacttcgcatccgcaggaatcatcaccatattgtgcatccagattacgcaaaagcggtcgcttcaggcctcgtgggcccgatttgccgcctgtttattggcgatcgtcttctcatatgtctttttcgggctgatcggctattatccgtttgcgatcggaatattgctggtgctgttcattccgactacagtcgttttaaaaataaacgaagggatcgtcaccagctcagtaatcattcttcatttatatatgtccggcggcattacgatggcgtttatctggaatgagttccagctgatcaccgtaggtatcggcgtcgcgctgttaatgaatctgtatatgccgagcctcgacagaaaactcgcggcgtaccggaaaaaaattgaggacaacttttccgtcatcttcgccgaaatcgaacggtatttgttaactggtgagcaagattggtcggggaaggaaataccggagacgcatcagatgattcaagaggcgaaaaacctcgcctatcgggacgtgcagaatcatattttgcgccatgaaaatctttactatcattattttaagatgagacagaaacaatttgaaatcattgaacggctgctgccgaagattacctctatttcaataacggtggagcagggcaaaataatcgcccatttcatccatgaattaagggaagccattcaccccggcaataccgctcataaatttttaaaaagacttgcagaaatgagaacggaatttgaagaaatgccgctcccggcaacgcgcgaggagtttgaagcgcgggcggctttgttccacctcctcggtgagatggaacaatatctcgtgattaaaagttatttcaaaggcatcaagctgtaaaaaacatatggatcaatcgcatgagtcctcctttcattggtcattctaatgaaaaaaaggagaggagcccatgcgattttttttattgtcagccgccctgctgctgtctccgctttggccgcttggcgcgaaccctttgccgggtgacccttatattatcgtcaataaagccacaaatgcgcttgctgttgtgaaggataaccgaatagaaggcatttatcaggtggcgacgggaaaaacggatgatttgacgcctgaaggagaatttacggtaacggtcaaagccgtcaatccgtattaccggaagaaaaatgtaaagggaggcgcgccggaaaacccgctcggcgtccgctggatcggttttgacgcgaaaggaaccgacggcaggatatacggcattcacggaacaaacagagaagagctgatcggggggtttgtatcaaacggctgcatccgtatgaaaaaccgggatgtcatccgtattttccggattatccctcccggaacgaaagtattgattacaaaagaaaaccgctcattcgaggacattgcaatagagcggaaagccctcataaaaaagcaggaaacccccttgcaatgaggcgcctgcttttttaccgcaaatacatcataatgcctgagaggagggttgaaagtataaatacgcccaaaatgacgataacggcgcttttcataaatttttgagacattgtttcactccttaagattactgtctatcattttaacgtgttttgcttgtatgaacaagccatatcctatggcggaaagcaggtggccgcgctatgaaaaaacttgatcatgtcggcattgccgtcagctctattgaagctgcgagaggattttacgaacggatgctcgggcttacgtatatgggagacgagctggtaagcggccaaaatgtgagagttgcttttttagaggcgggaggcacaaagcttgagctgattgagccgctgtcggacgcgtctcccgtcagctcttttttacagaaaagaggcgaaggactgcatcatttggcattccgctgcgccgatatgaaggaaacgatcaaggagcttgaagcatgccgcatgactttgatccatcatgaaccgcaatacggagcgggcgggaagaagatcgcatttctctctccaaaagaggcgaatggggtcctgattgagctttgtgaaacaattgaaaaaggagaaactgaagatgagcatgagtgatcatatcagacacttaaatgaaagacgttcctttttaacaaacggcggcggagcggaaaaaaatgaaaaacagcacaaaaaaggcaagctgacggcaagagaaagaattgactatttattggacgaagacagtttttcagagctgcagccgtttgccaaaagccgcatgcccgggtcccgaaatgctccgggagacggcgttgttaccggatacggcacaattgacggacggcccgtgtatttgtttgcccatgactttaccgtactcggcgggacgctcggcgagacacatgcggaaaaaatcgcggcggtaatggatctggcggcgaaaaataaaactccgatcatcgggctgaacgactcaggtggtgcgagaattcaagagggtgtggtatcattaaatggatacggtcatatctttaggcgcaacgtcctttactcgggagtgattccgcaaatctctgtcatccttgggccgtgtgccggcggtgctgtttattcacccgcattgacggattttgtgattatggcggagcatacgtcgcacatgtttattacaggcccgaaagtcattgaacaggtgacgggtgaacagattgacgcggaaagtttaggcggtgcgggaatacataatgtgataagcggaaatgcccactattccgcacgaacggaaaaagaggctctttccgctgtgaaaaccctgctttcttatctcccgcacggcggacagacggcatcacccgttaaaaaggaagacgccagaccgttattaaacaccctcgttcccgcggacagttcgaaaccttacgatgtgttacaggtaataaaagagctggcggatgacggaacgttttttgacattcagccgtattttggcaaaaacattgttgtcggttttctgaaactcggacggcgtacagtcggtgttgtcgcaaaccagccgaaacacttggcggggagcctcacgattgatgcagctgacaaagcgtcgagattcatccgtttttgtgacgcgtttcatattccgctattgacgatcgctgatgttccgggatttcttccgggctttcagcaggaacatgcgggaatcatccgtcacggagcaaaattgctgtatgcttttgccgaagcgacggtgccgaaagtgacgctcatcatcagaaaagcttacggaggcgcctatgtcgccatgaattcgaaagggctcggggcagatcttgtattcgcctggcccaatgcggaaatcgccgtgatgggagcggaaggcgcggcgtcgattttatacagcagagacatacaggcttctggcgacccggagaaaacgaagcgcgaaaaaaaagccatatacgaaaaggaaaacgccggtccgtataaagcggctgcctgcggtatggtggatgatatcatccggccggaagactcgaggaaaaaattgattcaggcatttgacatgcttgcgcataaggaagaggaaagaccgaaaaaaaagcacggtaatataccgctttaaacggagggaactgaaaatggtaaacgaaaaacgtctgcttgaagaatttcttgaactcgttcaaattgattcagagacaaaacatgaagcggaaatcagcaaagtgctcaaacaaaaattcactgatttaggattgagcgtaaaagaagatgatacaaaagaagtgaccgggcatggagccggcaacttaatctgtacgttaaagggcacaaaagatgcggatacgatttatttcacatcccacatggacacggttgtcccgggcaaaggcgttaagccgattgtggaagacggctatgtaaaatccgacggcacgacgattctcggcgctgatgataagacgggtcttgccgcaatgtttgaagccattaaagtgctgaaagaacaaaacatcgagcacggcaccattgaattcattatcacggccggagaagaatcgggattagtcggggcaaaagcaatggatcgttcagacattaccgcgaaatacggttttgcgcttgattcagacggaaaagtcggcaacattattgtagccgcaccgacacaagcgaaagtgagagcaaccattttcgggaaaacggctcatgcgggagtagaaccggaaaaaggcatctccgcgattacaatcgcatcaaaagcaatctctaaaatgccgctcggccgtattgataaagaaacaacggctaatatcggacgtttcgaaggcggcacgcaaaccaatatcgtctgcgaccaggttgatattctggctgaagcgcgttcattagtgcctgaaaaaatggaagcgcaagtgcagaaaatgaaagaagctttcgaatctgctgcagctgagatgggaggccgcgcggaagtggacatcgcggtcatgtatccgggtttcaaatatcaggacggcgatcaggttgtggaagtcgcgaaaaaagcggcggcaaaaatcggccggccgagcgaacttcagacaagcggcggcggaagtgacgcaaacgtcattgccggccacggcattccgacagtcaacctgtcagttggctatgaacaaatccatacgaaaaatgaaaaaatgccgattgaagagctcgtcaaaacggcggaaatggtcgttgccattatcgaaacagcggccaactaaaaacgaagcacccagttgattgggtgcttttctcattcttcatgataattggcgtaaagcttcgcagatacaagaaaaaaccctgccggataggttccggcagggtttcagtattatgatttggcgggctccgcctgagccgcagcctgtttctttttatgatgcgtctgctgtaaaagtacgttctgcactgtcaaaaacagtccgcttgtaaaccagtaaagcggcagcgcagccggtacgttaagcgaaaaaacggtcatcatgacagggaaaataaagaccatgatttttgctgactgcatcgcggccggattttgagcagccggtgaatatttctcgtttaatttttgggaaatataagcctgtaagaaatacatgccccccgcgcacagtgatacaagaatatcagaatgccctaagctgaaccacagaaatgagtgtgaagcaatttccggcgttgagcggatggcgtaataaaaaccgatcaaaatcgggaattgcaccagcatcggaagacatcccattgccatcggattcagattgtgctcacggtaaagcttcatcatttccatttgcagttctttttgtttttccgcatctttcgtttgttttattttagcctggatgctgtcgacctgcggtttgatcacagccattttttcctggaacacccgctgtttcttaaattggttcacaaacaaaggcaatacaacgatccggacgataatcgtcaccagaataatcgacagtccgtactcaccgtggaacaggcccgccaccccttttaaaagtgccgaaaacggctcgatcaggtaatcgtggaaaaaaccgatattcccgaggcctcccgtctgagtctgagatgtcgccgcaaaagccgagcggcctgtgcacagtacgataaaaaacaatccgaatgcaatccatttttgatatgttttagacaattatgtttcctcctttttatcttcacttgccgttataaaaggaggaagctgacatcttcatcatcattcgccggtgaattcatgcggatgactttacgtatccaagttgtaatgcgatgatatataataataagaaagtctgttcggttcagctgaacgactgcttgatgttcatctattcgtttcgttctccaatgctcgcctgcgcggcgctcacgcaaaagaaaagcgatgccgatcgcggtcagagcgggaagaataattgtgaaaaaatcgactaaaaataaaaagtcattcattgactcaagaatcattttatcacatccattcagctcttattttactacatatatataaggttgtctatgaaaggaaaggaggcgccgggagtggccggaaaagggagaattatatttcatatcgatatgaacagtttttatgcctccgtagaaatggcgtatgatccgtctttaagaggaaaacctatcgccgttgccggaaacgtgaaggaacggaaaggaatcatcgtcacctgcagctacgaagcgagagcgcggggcgtaaagaccaccatgccggtgtggcgggcaaaacgcctctgtccggaactcatcgtcgtgcctccgaattttgaccgctaccggagttcgtcaaaagaaatgttcagcattctgagggagtatacggatttagtcgagcctgtttctattgatgaaggatacatggatattacggacacaccgcacagacacagggcgtatgagacagccgcagacattcaggcgagactgcaaaaagagcttttgctcccgtcaagcatcggcatcgccccgaataaatttctcgctaaaatggcgtctgacatgaaaaaaccgctcggcatcaccattttaagaaaaagagagctgccggacgtcttatggcctcttccgatagaagagatgcacggtataggaacgaaaactgcggaaaaaataaaaacgctcggcatcaaaacgatcggtgatttggcaaaaggagatgaacacgcgctgaaaacgcttctcggcataaacggcccgaggctgaaggataaagccaacggcatccatcctgcagaagtcaatcccgagcggatttatgaatttaaaagcgtcggcaactcatccaccctgtcgcatgattcggctgactgggatgaattaacgggcgtgtttgaccggcttgcgctttctgtgagcgaacggctccagcgtaaggaggtcatggcctgccggctgttcatcatgattcggtatgcggattggaaaacggtcacaagaagcatgaccctcagcaatccggctgatcagaaaaaagacatcatggaagcggcgatggaactgtttgacaagcactggaaccaaaatccggtaaggcttctcggcatcaccgggacggaactggttgaaaaacagcaggcgtataaacagcttgatctgttttcattcaaggaggacgcaaaggatgagccgatttttcagatgatgaacgagctgaatgaaaagtacggccaaaacctgatcagaaaaggcgccgttataaaaaaagaagaaagcaaaacaaggggaacgagctttaacagagacttttttcaggatgaaaagaaaaggtgaataacttgaaaaaaggggttatgtatgataatttctttagtataaatatcattttattttaatttaaattttaaaatggttaaacgtttgaagaagggacgttagaatatgtcaaaacaacaaatcggagttatcggtcttgcggtaatgggtaaaaatctggctcttaacatcgaaagccggggattttctgtgtctgtatacaacagatcaagcagcaaaacggaagagtttttagaagaggcaaaaggcaaaaatgttgtcggtacatacagcattgaggagtttgtccagtctcttgaaacaccccgtaaaattttattaatggttaaagcgggaactgcaacggatgcgacgattcaatctcttcttcctcatctggaaaaagacgatattttgattgacggcggaaatacatactataaagatacacagcgccggaacaaagagcttgccgaaagcggcattcactttatcggaacgggtgtatcaggcggtgaagagggagcgctgaaagggccttctattatgccgggcggccaaaaggaagcgcacgaactcgtaaaaccgattttagaagccatttctgctaaagtggacggagaagcttgtacgacatacatcggcccggacggagcggggcactatgtaaaaatggtgcacaatggtatcgaatacggtgacatgcagctgatctctgagtcatatttcattctgaaacaggtgctcggattgtctgccgaagagcttcacgaagtattcgctgagtggaacaaaggagagcttgacagctatctgatcgaaatcacggctgatattttcactaaaaaagatgaagaaacgggcaaaccgcttgttgacgtcatccttgataaagctggccaaaaaggaacgggtaaatggacaagccaaagcgctcttgacttaggcgtgccgcttccgattatcactgaatctgtttttgcgcgtttcatttccgcaatgaaagaagagcgtgtgaaagcaagcggccttctgtccggaccagacgttaagccggtcactgaaaataaagaagagctgattgaagcggtcagaaaagcgctcttcatgagtaaaatctgttcttacgcacaaggcttcgcccaaatgaaagccgcgtctgaagaatataactgggatctgaaatacggtgaaatcgcgatgatcttccgcggcggctgtatcatccgcgcggcgttcctgcaaaagatcaaagacgcatatgaccgtgaaccggagcttgataatctgctgttagacagctacttcaaaaacattgcagaaagctaccaaggcgcccttcgccaagtgatttcacttgccgtagcccaaggcgtgccggtaccttcgttctcaagcgcacttgcgtattacgacagctaccgtacggcagtgcttcctgcaaacttgattcaagcgcagcgtgattacttcggcgcgcatacgtatgaacgcacagataaagaaggcattttccatactgaatggatgaagtaatgaagaagcccccgcattgattgcgggggcttttcctgatattaaaaaccgcgggccgtcatgaacggcgccgcggtttttaaattttttcttatatattccaccagtggaggccgtctttttcaagaagatcgtccgaagctttcggtcccattgacccggcttcataattcggagaaagggttttgtcggctgcccacgtttcggaaatcgcatcgacgaaattccaggaaagcgccacttcgtcccaatgggcaaagtttgtcgcatcaccgagcagacagtcatggattaatttttcataggcttccggtgtgttcatttcatcactgcagttgctgcagtaatccagcttaatcggctgagcatgagcggctccgcctaattttttagcgttcagatatagtgtgatgccttcatccggctgaatatggatgacaagcaggttcggatttacattcgtttcattgccgtaataaaggttcatcggaatgtctttaaattgaacgacgattttcgttgatttttctttcatccgtttccctgtgcggatataaaacggaacgccggcccagcggaagttatcgattaacagctttccggacacgaatgtttccgtattggaatccggtgctacattttgttcatctgtatagctcggtacagcgtttccgtcaatctttcccgcttggtattgtccgcggacgaagaagtcactcacttcgtttggagcgacagggcggagagctctcagcaccttcactttttcgctgcggatttcttccgtgttcagtttaatcggcggttccatcgccaagagagcgaccatttgcaaaatatggttttggaccatatcacggagtgcgcctgatttttcataatatctcgcgcggtcttcaacgccgagatcctcacttgacgtaatctggatgtttgagatgtagcggttattccacagcggctcaaacagcgcatttgcaaaccggatgacttcgatattttgaaccatttgtttgcctaagtaatggtcgatccggtaaatttgatcttccgtgaaagcttcgcgtatttctttgttaagctctttcgcactcggcagatcatggccgaacggtttttcaatgacgagacgggaccagccatttgtcgctgtgacaccttcgtttttaagtgattttgcgatagtgccgaaaaactcaggagccatcgccaagtaaaacattctgttgttcgggatttcatatgtatgttcaagctgatcaagcaggacattcagctcctgataggaacccggattcgttacatcaaacggatggtaataaaaatgagatgtgaaatcgtctatgtctttttgcccggcagaagaaacagacgttttaaccgtttcccggaggtcctcgtttgaccaaggtcttcttccaacacctacaactgcaaactcttcaccaatttgaccatttttatataaacggtgaatggatgggtaaagttttcgttttgccaaatcccctgtggcaccaaatattacaattactgcttttggtttgtcgtttgttttcacttagagtacctcactttatctgaagcatggtttaaaaccccgcatatttccttcattttaaatctaaaattcgttgaaagcaaacatttcagcctgttttttgcggtttgcggaaaaaaattaatcaggccggagaaggcccgggtgaattcacattttcagcctgatcctgtatccttagtagtacaaagatctaggaggaagcattgtggaattattatttttagggacgggggccggcatgccggcaaagacgagaaacgtaacgtccgtcgcgctgaagcttcttgaagaaaggcgttccgtatggctgtttgattgcggagaagccactcagcatcagatattacatacaacaatcaaaccgaggaaaatagaaaagattttcatcacccaccttcacggcgaccatgtttacggtcttccgggtctgttggggagccgttcatttcagggcggtgaagaagagctgacgatttacgggccaaaaggcattaaagcctttatcgaaacaagcctgaacgtgacggcgactcatctgacgtatcctcttaccgtacatgaaatcgaagaggggacggtttttgaagatgagcacttcattgttaccgcagcatccgtcattcacggtgtggaagcgttcggctaccgggttcaggaaaaggatattcccggcgcattgcaggccggcagattgaaagaaatgaatatcccgcccggacccgtctatcagaaactcaaaaaaggcgaaacggtcacacttgacgatggcagaatcattaacggacgggattttctggaatccccgaaaaaagggagaatcgtcgctttttccggggatacgagggcatcagagcgggtaacggagcttgcgcgcaatgcggatgtgcttgttcatgaagcgacgtttgccaaggaagatgcaaagctcgcacataattattatcacgcgacgacagaacaggctgcgcaaacggcaaaaaaagcaggcgccaaacagctgatcttaactcatatcagcgcaaggtatcagggtgaatcgccgatagagcgtctcgaacatgaggcgaaagcggtatttgaaaacagtaagatcgcatttgatttcatggaggtcactgtggagcggtcttaaaaaatagacgcttgacatttttttctgatgagatataataaaacgtaataattacgatttgtataaggggtgaaaatgatgcgtgtgaatgttacattggcctgtacagagacaggggacagaaattatatcacgacgaagaacaaacggacgaatccggaccggttagaaatgaaaaagtattcaccccggttgaaaaagtatactttgcatcgtgagacaaaatagatcacgataacaaaagccattgtgccgttgcacaatggcttttgttttatcagtttaccgcctgataggcaggagcattcatttgctggcgcaccgcgcaccaaacatcataaatggcaaggtggacgatgtgcggttcatcgtggtgaatggcatgagaactgtttttggcctgaatccatccgctttgataagagacatcaagcatgcttctgtgcagtttcacccattgttcatgagcgtgctttaagcgctcatcccgctctcccgatgataaaatcaacagcggcatatcgccgaaatgaatctgctggtgcttgatctgacgaaggctcgtcaaaaattccgcgtgtgatccttccaatatgaactgtttcaaataggcggctttcatttcttcgggaagaagcggaagcactttcgtctcctgatcctcagaaaccggatcaagcatcaccatcccgagaatatcccggcggttccggctcgcccaaagtctgctgataatcgcgccgtatgaatgcgagacgacaagataaggaggcttgacgccggccttcagaagaagagcgtttaattcctgtaccatgtggtccgccgttctctcgtttcggctttgtccgcttttgccgattccggctctgtcatatgtgaaaaccccaaattcttcatctatgtcagcgagtaatgatgtccatgtttcagaagaagtgccgtagccggcttcaaagacgatcgtcacttcgccggcgcctttacggtgtttcgtataaaacggacacccgtcaatcagatatgtcctttccatccatgctgctttcattggagtcatcccctctaattggttctatagggaagacggagaagcttcggcaatcgtttctcaaaaaataaaaaaagagacagccggatcgaaaaactccggctgtcatttcatcaccatgctctgtcgtattgaaccggtgacggtatttcagtattcagctgcttcgctgcactccttgcaaagtgcggatcgcgcagaagttctcttgcgacaaaaataaggtcagcgcggttgttttgcagaatttcttccgccattgttcccgtcgttatcaaaccgacggcgcctgttgcgatttcggcctgttcacggattttctctgcgaagctcacttggtagcctgggaagacattaatatcagcttgaacgagtgcgcctgagctgcaatcaatgaggtcgactccctgttctttcatccacttcgcaaaaccgatatgatccgcaatgtccagccctttgtctgtataatccgatgcagaaatacggacaaataacgggccgtcccagacttccttgacagcttcaatggtctcgcctaagaagcggtagcgattttcatgtgagcctccgtattcgtctgtacggtgattggacagaggggacaaaaattcgtgcattaagtagccgtgtgccgcatgaagttcaataatatcaaagccggcttctttcgcgcgcgccgctgcctgtttgaattcctgaatggtttctttaatttgttctgtcgtcatttcagccggtgttttggactgctcatcgaacggaatggctgacggagcgtaaatgtctccctcaagctcagctttacgtccggcgtgcgcaagctgaatgccgattttagatccttgcgctttcacttgttccgtcagtttggcaaaaccttcgatatgatcatcgctccaaatgcccaaatcctgatcggaaatgcgcccctgcggattaacggctgtcgcttccacgataatcaggccgacctgtccgattgcacgcgatatgtagtgcgccatatgaaaaggctgcagttttccgtccttctcatgtgaggaatacatgcacatcggtgccataacaatacggtttttgatcgttacatctttaacggtccatggtgtgaataattttctggccatttatttcgcctcccggaatgtttttagacattgattataacaactcatgatcattcagtcatataaactgctcgcaactgaacacatcgttcttattgttctggacgggcatttttttatacacagcgtggccgtatcttcataacaggcatttacagccgatcatatagcaaatatagatgagaaacgcaccgatgactgcgtggcctcctttgaaccagtttgtcaggatgagtatattgctgatgaagatcaccgcgccgaaggcaccgaatattccgtttttttgagcggctctgaaatcgtcggggctcatatttttcagctgtaagtgaatattcagtaacgtcatgggcgcagcctgtattaaagtggctttcttatgtgccggtctgcattcttacagcaaacgcttttgatcaattggccgggtttgatcgtccttatcccgaccatcgtgatcgccttgaaaacaaaaagtttgaccgtgacggtggtgagcggggttatttcggtgtcgggctttcgtctgtttatataataaaagcatcaacggcacatgctgttgatgcttttattgaaatgctagggtttggagagcacttcaattccgacgttgaccattttgtccagtcccataaaagacaggcagattttggcgcgtctttttcttttatcgatctttttaataatgccttccattcctttaagaggccctgaggcaacggttacttttgaattttcaatatagacttttgaataatctacagtgtctccttctccgatcagcctgatgatagggaggatttcttcatccttaattgtcgtgaaataggttttacgctctttggaataatatgcgccgttattcacgattctgcatgaaatggggagttctttgattttatgaaatgtccgctctgtcatcttcgttttaaacagcacatatcccggaaacatctttttgagtgcctcgtatttgattccggcttttcgttctgtgacttttttcttgggtatgattgagtagagagcctgctcatcaaactgcagacgcagaaatttttgaactgtttcttcttttccggactctacaaaaagtgcgtaccatttcatgactggatcctccttagaataataagaaattattatacaaagaaagtatttaatggatagtatttaaaatgattaaaaatttttctaattcatcttttttttacataatatatgaaaatgaaaaataagtatagacccaattgacagagaagcgatgaattttctttgacatgaatagggttcagggaattatctgacatttatcccgaaacaattatgccgactgtccaccgaacataaaactgtggaataaatgtcagaaaataacgaaataaatccttgacattattatctataaattgatattattctctttaaatagcaactatttgttaaatttattaaattgatgtaaagcacctattaaatttcaatcgctgtttcggcacgttgaagaggaaatagggattataaaaatgattgtagtgtatatatctacatatacatgataagggagaagtgtgccgtcatcgctgttttcgggcatattggcactgcagcttgtcatgcgaaacattcagtaaacaagcaagatgtctttatataaattatgttagaaaaggaaaacacaatgcgtttgcgatttttaaacctgtgctgaatcgcaaacgcgtttgtgtttttatttttatgccggtgtttacaccagtcaatatatgaaataagagacgtttttgtatggagatccacatgtgatgtacaaaattggcgatgcggaaaggatgagggtaagatgcttacgtttgtgttcccggggcagggttctcaatttaaaggaatgggagccggactgtttgatgaatttcaagatctgacacgtcaggctgatgacatattaggctactctatagaagaattgtgtctggaggatccgaatcaccagctggggaaaacgcaatttacccagccggcgttatatacggtgagtgcactcagttatttaaagaaaatgaaagagtccggcagagagcctgattacgccgcagggcacagtttaggagaatataatgcgttatttgcggccggctgctttgattttgagaccggtttgcagcttgtaaaaaaaagaggggagctcatgagcaaggcagctcccggaggcatggcggcggttttggggtttaccgctgaacaagtaaaagaggttctatccgattatcatctgaccggcattgatatcgctaaccacaattcaccttcgcaaattgtgatcgccggaacgaaacaagacattgaaaaagcgggccccgtctttgaaaaagccggcgtgagaatgtaccttcctttaaatgtgagcggcgccttccattcccgctatatgaaagatgctgaaaaagagttcgcggattatttagaagaaacggcgtttttgcctcttcgttttccggtgatctcaaatcttcatgccgcaccttataagaatgatgaaatcaaaacaaatctgactttgcaaatgaccaatcaggtaaagtggacggacacgatacgccgtctgatgggacttgaaaataatgaaattgcagaagtcgggcccggggaagtgctgacaaaactgacgcgtcagattaaaaaagatgccgtcccattacctatgccgaaagaagagtctgatactgctgatgttaaagcatcggcagctgatccgcaaaaaacggcgggaatgagattagggaacgaagattttaaaaaagattataacatccaatatgcttacatgacgggctccatgtacaggggaattgcttcggaacagatggtcattaaagcggcaaaagcgggaatgctgggctttttcggaacgggcggattgagtatcgaacggatcggacaggccatcggaaccatccggtctgcactgcggcaaggggaaacattcggaatgaatcttcttcatcatatgatgtcacctgacaaggaagtcagaatgatagatttatatttgaaaaacggcattcatcttattgaagcatcggcatttatgggcataacccccgctcttgttatatacagggcaaagggattaaccaggaatcatgacgggtcggtgtcagttcaaaacagaatcatcgcgaaagtatcccggcctgaagtcgctgaggcctttctgaatccggctccggctcatgtgctggaaagacttgtgtctgacaatcggctgacagccggggaagcggcgcttgcaaaagaaattccgatggctgatgacatttgcgttgaagcggattcaggagggcataccgaccaagggattccgtatacattaatgcctgccatgatcagactcagagaccgcatgatggagaagcacggttatgcgaaaaaagtaagaatcggcgcagcgggcggcatcggcactccggaagcggctgctgccgcgtttctgctcggcgccgaatttatcggaaccggttctattaatcaatgcacggtcgaagccgggacaagtgattcagtgaaagatctgcttcaggaagcgaacgtgcaggatacgtcatacgctcccgcgggagatatgtttgaagcgggagcaagggtgcaggtgctgaaaaaaggtctgtttttcccggcaagagccaataaactctttgacttgtacagacaatacaattccttagatgaaatagatgaaaaaacgaaaacattaattgaagaaaagtatttccagcgcagttttgaagaggtgtatgagcagttgaaacgtgataaatctcctgagcagatcgccaaaaccgaacagaatccgaaacacaaaatggcgatggtatttaaatggtatttttctcatacgacaaggctcgctctggaaggaaaaagcgaaagtaaaatagattaccaaattcattgcggccctgcgctcggcgcgtttaatcaatgggtgaaaggaaccccgcttgaaaattggagaaacaggcatgtcgatctgatcggcaaacagctcatggaagaaacagccggccttcttgcgcaaaggctggtatcgattacaggctgagtatgaccagccattacattttttctgcggaggacagaccatgctgattgaaaatcatgaattaacgatgagccatgtcgggttagggaatttgaatgagtacgcgctgctgctgttattcggcaacgcacacagtcaccatttaacggacggaacgggattccggcctgatcagatggccgatcaccaagggctgattttgtatccggcttattttatgacacatctcaaagttccttcagatcagcctcttgatcagtaccgattatgggacgaggtttccgtcggagtcgatatctcccggtttggagaaaccatattagaatctgattatttgttcgggccgaaaggagcggtcagctctgataaaagcgagtgggaccggggacggtttccttctatgaaagccaatagtttaattgtcgtcgacgtcacacaaacagaaggttcgacgcgcaaagtttcagcgcctaaggctgaatgcattgcggaactttctaagctagccaagccgccttacgccctgatgcggtcaaagaaaatcagaacggacgccttcggtatgaagccgggcaatctcaaaacagcagaccccgtttcatatcgggttcctgttgatcaggatgctgcgcccgggcatgccatggtgtttgcgaaattcagcaagataatggatgcggcggaatttgaatggatgacgcgccgatcgaagccgggttttccggtttcaatcgcgcggcatttatttttgcttgaaagagagacgtattattacggaaattgttttgcggatgaagagcttgatatttatatgacgggacacattgaagaatgcgatcccgactttcacggtgagtccctcggtatgatctcagtggcgaaaatcagctatcagattgaagtctatatgaaaagaaatcatacattgctggccatttccaaggtggacaagctgctggcggtgccgacctcttcacaagatcatattccggattataagcgggtcatcagaagtttataaaatgaagaatggagctgaaagcaaatggaacaaaccaaggaaatgaagcagatcatcgctcaaatcattcaggacattcaagaacagcagtcatatcgggccgtcgaagcgggagatgatgtgagagtcatagaggatctgggcttctcatcactggatatcgctcaattagtcgcacagatggagatggaaaccggagtagatcctttttcccaaggagaaacaatttccagcattacaaccgtcggcagcatttgtgatatttatcaaaaatatatggacagtgctcaatcatgaaaacagaaagcgggggagatatcagctgggtgactgataagcttagggaaacgcaagacagtgagtttctcatttttaaagggcagacttttacgtatgatgatttgctgacacgaattagcttttttcagaaagaacttgaacaaaacggaatacgtgaaggagaatgtgtggcgcttatcggggattattccccgaacgctatttttttgctgatggcgcttttgttaaaccgaaatatcgttgtccctctcagcaatgaatcaagggaaaagcatctcgatatgtttgaagacgcgaaagtgaatcaaatcattgaaataaatgaaaatgacagctggacgcttcgtgaaggttctgaaagcgcctcccaccctctgcttgatgacctgcgcgagagaggggagtcaggcattattattttcacatcgggaacctccggcaaaagcaaagcatccgtgttaagcgccggccggctgcttgaaaaatataaaacggcgaagagaaaaccgctgcgtacgctcatttttctgaaattggatcatatcggcggcattaatacgctgtttgcgattctgtttaacggggggaccatcgtcacatcagacagcagaacgccggagtccgtttatcaggcggtcgacaagcatgctgtccaagtgctccccgcaaccccgacctttttaaacatgctgctgatgtccaaggcggatgccggctataacctctcttcactccggctgatcacttacggcacagaaccgatgccccaatcaacgctgcgcggcattcaccggctgtttccggatgtacggctgaaacaaacatacggattaactgaactgggtatattctcaacgaaatcaaaagacagccaatccacttggatgaaagtgggcggtgccggaacagagaccaaaattaccggaggcacgctttgggtccgttctgagtcggcgatgctcggctatttaaacgcaccgtcacctttcgatgaagacggctggtatgacaccggtgaccaggtggaaacagacggcgaatatataagaatccttggaagaaagagtgaaatcattaatgtgggcggagagaaagtgtttccggcagaggtggaaagcgtctttctggagataccgaatgtccgggatgttctcataacgggaagaaaaaatccgattacgggcgagattgtcgcagcagaggccgtgcttgaaaaagaggaagatatcaaatctttcagaaagcgggccgtagttcattgcaaacagaagctgcagccatatcagataccgcagatcatctctgttacagatcggaaactgtctaatgaccgatttaaaaaaataagaaacgtgtaaaacaggaggcaaatatgaataacggaaaagtagcggtcgtcagcggaggaagccgggggctcggaaaagcgattgtacagacgcttttggatgaggattacaaagtagccgctttcagccgcagtgaatctgattttattaacacattgagagagagtgaaaagtaccgcggccgcttttattgggaagcggcggatgcggcggatgatgccgccatgaaacagtttgttcttcaagtataccgcaagttttccagaatagacggcttggtcaataacgccggtttgaaccttgatcagctgctgcccctgaccaatgatgaagacattgaccgcatcctcaatctgaatatcggctcagtcatcaagctgacccgaaacgtttcccgtgtcatgctgaaacaaaattccggatcaatcgttaacataagctccattatcggctcaagaggatttaaaggcacttcagtctacagcgcatccaaagcggctcttgacggcttgacgcgaagcctggccagggagctcgggtctaaaggaatccgtgtcaattcacttgcgcccggttttgtggacaccgatatgacgaaaaatatgccggaaaaacaaaaatcgcagattatcagaaggacgccgatgggacgtttaggcgaaacagacgatatgaccggactcgttcgtttcctgctttctcctgaatcgtcctttatgaccggacagacaatggcaatagacggcggattaacttgttaaagcacagaaaaattcttttgtacaagggatggtatcctcatgaaatgtattaacgaatttttaagaacggtaatatcggaaaagctgggtgccgaggtgaccgaagcggaagataaaaccgctttttttactcttggcgtgacgtctctcatcagtgaagaaatcatgaccatattgcataaagagtttaccggcctttctgaaacgctgctgtttgaatatccgaacattgagaaattgagtgagtttttaagtgcgcagaaacgaaatcccgaaagcgttcttgaattcaaagaaacggagcctgatacgggaagcccgcaggaagaagaattgcttcccgtacaggcggctgaaaaggtgcctgaaccgggaacgggcgggagctctgatattgcggttatcggaatgagcgggatgtttccgaaagcggaaaaccagcatgatttttgggacaatttaatggaaaataaagattgtgtctccgaaatcccagaggacagatgggacagctcttattactcggaagagaaaacggcagaatacgcgtcatacagtaaatggggaggttttattgatcatccggatcaatttgacccgctgtttttttctgtttccccgtgggaagctgatttaatggacccccagcaaaaattgtatgtcacgtgctgctgggaagcgatggaggatgccggttacgggaacccggcggcgaggccgacggatcaaatcggtgtattcgccggagtgacctggaatgaatattcattaattgcacacgaagaaggtttcctcaaagatcagtacaaaggccccggctccttatattggggcattccgaaccgggtttcttatttccttgatctccatggcccgagcatcgctgttgatacggcgtgttcttcatcgcttgtcgccgtccatcaggcttgtcaggccattatgtcgggcgactgtgaaatggcgcttgccggaggcgtcaacctcagcttacatccgcaaaaatacatgtttttaagccaatcgcattttctgtcttctgaaggaaaatgccgcagtttcggtgaaggcggagacggttacgtgcccggcgaaggcgcgggagccgttttgttaaaaccactgaaaaaagcgattgcggataaagaccacatctacggtgtcattaaggggtccgccactaatcacggcggcaaaacgaccgggtatacggtgccgaatccggaagcgcaccgggacctgattttatccgctctaaacagagccgcggtaagtccggcggatatcagctacattgaagctcacggaaccggcacggcactcggcgatccgattgagatacgcggcctgtctatggcatttgataaacagaccgatgagaaaaactattgcggaatcggctcggtgaaatccaatatcggacatttggaagcggctgcagggatcgccggtttaatcaaggtgcttttaagcatgaaacatgaaacgcttcccgccagtctgcactccgaggaactgaaccgcaagatttctttttctgattcgccattttatgtcgtccgaaacaaccggccgtggccggctgaaggagataaaccgagaatcgccgcaatcagttcattcggcgcaggaggctctaatgcccatctgatcgtaggtgcttatcagccaaaacggcaagcggacaagaatactgagcaaaaaccgcatgccgtcgtattaagcgcacattccgaacagcagctgaaagaatatgccgggaaattgagctcctttcttgaccgattggaaaacctgccttctgccggcggatacagtctggaaaatatcgctgccaccttattgtcaggcagagagcctttctccttccggcttgctgtcattgcatcatccctttctgagctgaaacggcgattggacggatttgtaagcggtcacagcgtcggcaggtatatgtacttcggaaaagcgtcacccgggcgtccggacgtttcaggccaatccgtttcagatcctgagaaatttgccgcgctgtgggtgaaaggccttcaaggttgcaaaaagccggaaacgccgtatcagaaagttccgcttcctacgtatccgtttttaaaggaaacgtcctggctgaccgatcaaaaaaagcggtatacaaaaaagccccaaaatatcaaaaggcgtgaatcgctgcatcctctgcttgatgagaatatttcatccgcccggaaagggacgtttcaaaagatattttccaaggatgaatatttctttaaagatcatttagtgaacgaaaaatatgtgcttcccggagtctgtcatctggaaatggcggcatacggcgcgggattgtggggagaacgcccggtcgtctctcttcaaagtgtgtggtacatggagccgattgtgacagggacagacccaagatccgtcatgatagagtttgaagcagaaaaagagcgtataagctatgtcattaaagaaaaaggagcggacggcaccctcttttcgcaaggagaagtgatttgtaaagaaaaaggagcgtcttttgaggccccggcctttcagctcccggcggcatttgcgcagagaacggagccggaagacatctatcactcgttctctgaggcgggaatcgttcaaaaggacagttttcaggtcatccgcgaattctcttatacagaaaggaaagcactggccaaattaacgctcccgtcacacttggaagccgattttaaacagtacatcctacatccgtccttaatggatggcgctgttcaaactgcaatggcgcatgtgctgcaatttcaaaaagagcctgcgcttatcgtaccgttttccttcggagaaatacagctgcttgaaccgttagcgaaaaccgtatttgtgcatgcagaggtaaaagcggcctccgttcaccaatttgatctgcatatttgtgatgagcgcggcgtgctgttggcggcagtgaaagattttatcataaaagaggtgcaggaaagcgccgggtttaaccaaaaagccggcgtcacgccgaagacaagccgtgaaacggaattgcttatgacaccggtttggaacaccgtcaccattccggaaaccggcatgtctttcatgcgtatgcatgaagaaaaaataatcgtcatcggggccggtccggattttcagcaggctttgaaagagatgtattccgatgtccgttttccggacatcacttctttggacagcgcggaacaaatggctgaaacattgaaagcgcaaggctcttttcaacacatgatatgggcggcgccggatcatcccattccatccgtttatgatgcggatacggccgagggacaggagcacggggtcatgcagcttttccggctggtaaaagcgcttctgcttctgaattttgacacggaacaactatcattgacaatctgcacgtttcaagcacagccgattcatgaacatgatgaggtcaatccgagtcatgcaagcatacacggattagcggggtcgctcgcaaaagaatacagcaattggagcatccggcttcttgatttggaatctcaaaggggagaccggcatctccccgatgtcttctctttaccgtcggaccccgagggaaatccgtgggtctttcgtgcaggtcagtggcaccgccagcaattggccgtctgccggcctcatgcagatgagccttcattataccggcacggcggggtttatgtgattatcggcggagcaggcggaataggagaagtatggactgaatatatgattcagacctatcaggcgaaaattgtctggatcgggaggcggaaaaaagatacacagattgaaagaaagctgaaaagacttgcggctttaggccccgcaccgcgatatttcagcgcggatgctgccgattatgactctctcaaacgggcgtatgacaccattgtaaaggaaaatggaaaggtccgcggaatcatccattccgccatcgtgttatcagaccgaagttttgccaatatggaagaggatcagttccgcgcgtcactttctgcaaaaactgatgtgagcttgcagattgcccgggtagctgaaggggaacccctggatttcttgctgtttttctcttcgatgatgtcgtttcaaaaagcgccgggacagagcaattatgccgccgggtgcacgtttaaagacgcttttgctaagcggatctcacagaaagcgccgtatgctgtaaaagttgtcaattggggcttttggggaagtgtcggcgttgtcgcttcagaacaataccggaaacggatggagcgggacggaatcgcttctattgaggcgtccgaagcgatgaaaacgctggaaaccctgctttccggaccccatgaccagctggcgctgatcaaaacgacagatccggtttttatgaaagacgatctgaaagaacaagtaacggtttatccggaaaagattccttccgcactcggacaattaacggttaacatcacgcagaatgacgaagctgagcggttaaaagcatcaagtgtcatgagctgcatgagagagatggaatcccttattgaaaaaatgcttgtatcaaccctttatgagatgggagccgggcttgatcaggctttgccgttatttcaatcggctgccggcataacggaacaatacagcagatggctggaagagagctttgccctcctgaataaattagcgcttgctccggaaaaaacggatctagggcaggtgtgggaggaatgggagcggaaaaaagagacttggctgcgccagaaagacatgagggcgcatgtcagattggcagaagagacattgcgtgtgcttccagacattttaaccggtaagcttccggcaacggaagtgatgttccctgactcctccttccgtcttgtggaaggcatttaccgcaataatatcatttctgattttttcaatgacaagcttgctgacacattgattgcagttttgaaggaacgtctggaaaaagatccgcaggcgaaaatccgcattttagaaatcggagccggaacgggcgggacgagcgctgcggtcatgagaaaattgaaaccatatgaagcgcatattgccgaatattgtttcacggatatttctaaagcatttcttttacatgcagaagacatattcggtccggaatatccttatgtcacttataaaatattcaacgctgagcagccggtatcagcagaagcgccggacatcggcacgtatgacgcagtgatcgcgaccaatgtgcttcatgcgacaaaaaatatccgctctacgctgcgccatgcgaaagcaatgctgcaaaaaaacggccagctgtttataaatgagatcaacagccgcaccatattcaaccatgtgacgttcggccttcttgaaggctggtggctgtatgaggatcatgatttacggattccgggctgtccgggggttgatccggccggctgggcggaagcgctttcgcttgaaggattcgtccatcctctgtttccggctgaagccgcacacgacttaggccagcagattatagcggctgaaagtgacggaacggtcaggcttgccctcacgcaggcgtcagatgagaagccggagcgccgtccgtatgacgcagaaggtctttcggatgatactttgcatgtcagcttgagagaaaaaagcgttgaactgatgaagaaggtaatcggtgaagcgcttaaagtgccggcgcatcgtcttttatcccatgaacctttaaccgcatacggattggattccatactggtcgtcagactgaccaacgcgttaaaagacgtcttcggttctgtcagcagcactttgttttttgaatatcaaaccattgatgagcttgctgattactttctgtcttcccgtaaagaagcgctcgagcggcaattcgggattggacgggctcatcccgaaaacgccggacggatgcaggctcccgcagaaagcgccgcgccgattccaaacgtaagggaacggggcatcacatatctgacggaattaataggaaaaacgctgaagattccgagcgggagaatggatccgtcggtttccttaaccgcatacggtttggattctattctggtcgtcaggctcacaaatgcctttcgtaacgtgtttgaccaaatgaccagcaccctcttttttgaatatcagacgatagaagaaatcgcggattacctgcttctttctcagcggggagcatttatgaaagcgatgggtgtgcgtgaggcacagctgtctgatcacacagataacctgaatgtaaaacaaaacaagattcctcaaaacgaggaaggcgaaagggcgaacggagatccctctatccagaatatcgctgtcatcggtctgtcaggccggtatccgggcgccgatcacgttgatgagctgtgggaaaatgtaaaagccggcaggcattctattactgaagtgccgaaagatcgctgggactggaaaacgttttataacgaggaacgcggaaaatgggggtccatttattcaaaatggggcggttttctcgatgacattgatacatttgatccgctgtttttccgtatatctcccgcggaagctgaaaggatggatccgcaggaaaggttgtttctgcagactgcttattcaagcattgaagatgcggggtacaccccggccacgctttgtgacagccggaaaatcggagtctttgtcggtgtgatgaacagcaattacccgacagttcccagcgactggtctatcgcaaacagagtatcgtttttgttcaatttccaagggccgagtatggctgtggatacagcctgctcttcttctttaacagctgtccatctcgccgcagaaagcctgcggagcggaatgagtgaaacagcgattgccggcggagtcaatcttatcgttgatccggcccactatgagcggctgtccgctttttcaatgctgtctcccggtgataaatgcaaatctttcggagacagtgcggacggttttgttgacggtgaaggagtaggggcgattgtgttaaagccgcttgctcaagcggagaaagacggcgatcatatttacggcgttattaaaggaagcatgctgaacgcagcaggcaggacaaacgcttatatggtgccgaatccgaaagcgcagtttgatctgatcgcagagacgttgaaacgaacagacattcacccgagaacggtcagttacttggaagcccacggaacgggcactgcgctcggtgatccgattgaaatcgacgggttaacgaaagcttttcgcctgacaacagaagatcggcagttttgttccatcggttccattaaatcaaatatcggacatttagaaagcgctgccgggattgcggggatcaccaaactgcttctgcaattgaaacataagaggattgccccttcattgcatgcggcggaattgaatccgaatattgagtttgagcacactccgtttttcgtacagcaaaaagaaacggaatggaaacgacctgtcttgaatatcacgggtgaaatgaaggaatatccgagaattgccggcatttcctcgtttggagcaggaggctcaaacgcgcatgtcatcattcaggaatttgtgccgtctgacagcctgaaaccaatggaaaacgcgtctgtttctccgcaaaaaccggctgttattattttatcagctcgaaatgagcagcaattgacagagcgcgcccgccagcttctggatgatgtcataagaaaaaaacgttctgacggggatttagccaagatcgcttacacgcttcagacgggaagagaaccgatggctgagcggcttgcatttacggccgagtcgatagaagaactgaaaatgaagcttatgagtttctcaaacgatcataatatcgaacatgctcatatctggcggggcaggacagccaaacatcattcattggcggcttcgctcacttctgatgaagatatggcgcttaccataaatgcctggctgaaaaaagggaaatacggaaagctgcttgacctttgggttaaaggacttgacgtcgattggtcagctctttatcagcgcaacccgggccgcatcagtctcccggcctacccttttgccaaagaccgatattgggtcacaaaagctgatgtgtcacttgacaaaacaggctcagcgaaaagtgagaaagcagccagacttcacccgctgctccatacgaatacatcgaccttgaccgcccagcgttttacttctgttttttcaggacatgaaccgttttttgccgatcacattgtcaatggaaaaccggtgcttccgggcgcggctgctttagaaatggcccgggccgccgttacacttgccgccgaagacttgcccggcgggaaaacgggtgtaaggctcaaacagatcgtttggctccgtccggtgacggcgctttctgaaggagtgacgcttcatgtaaagcttcagccggaagaaaacggagacattgcttttgaagcgtatgccgaaggagaagagccgcttgtctttttccagggaaaggccgtgctcgaagagacggagcgtgctcctgttctcgatgtggaagcggttcaggcgcgctgcagcggccggcgtatgtcaaaggc

SEQ ID NO: 4 - DNA, 298827 bp, Bacillus subtilis
ccccacgctttcgctcctcagcgtcagttacagaccagagagtcgccttcgccactggtgttcctccacatctctacgcatttcaccgctacacgtggaattccactctcctcttctgcactcaagttccccagtttccaatgaccctccccggttgagccgggggctttcacatcagacttaagaaaccgcctgcgagccctttacgcccaataattccggacaacgcttgccacctacgtattaccgcggctgctggcacgtagttagccgtggctttctggttaggtaccgtcaaggtgccgccctatttgaacggcacttgttcttccctaacaacagagctttacgatccgaaaaccttcatcactcacgcggcgttgctccgtcagactttcgtccattgcggaagattccctactgctgcctcccgtaggagtctgggccgtgtctcagtcccagtgtggccgatcaccctctcaggtcggctacgcatcgtcgccttggtgagccgttacctcaccaactagctaatgcgccgcgggtccatctgtaagtggtagccgaagccaccttttatgtctgaaccatgcggttcaaacaagcatccggtattagccccggtttcccggagttatcccagtcttacaggcaggttacccacgtgttactcacccgtccgccgctaacatcagggagcaagctcccatctgtccgctcgacttgcatgtattaggcacgccgccagcgttcgtcctgagccaggatcaaactctccgataaagtagtttgactgactacgcacatcgctgtgcgatttatttaaaactttgaattaacaggtacgttttgtcttgtttagttttcaaagatcatctcaacctcatctcgaggcgactttttcagtataacattccagcaagttgctgtcaaatgtttttttgtttttatttctccgccgctgtgagctttttgttgaagcgcatcagcgacgtttaataatataccatgcctatgattcagcgtcaacactttttttgaaagaatatcctcgatgatatacttcctgccctttggtctctatttgagatacttcaacaaagcctttttccgtcaggtaatcaagcatgacaccaagatcttgggtgaagtgcagcagttcagggtgctgcagcaattctccaaactgccacatttctttttctttcatcacttgaaaaaggtgcgcagaaccgatttcagcttttgaatggatgagaaaatcatttgctaagaataataattcgagccttttctccaaactttcgtgactctcgacaagttcggaatatagcttatatacctgcggctcaatgtgacggacctggttccagactgtcgtttcgggataaaacccccggtcaatcacttctatgcgggccaagtggtgaagagcatgcactaccgcataatatgcatccagaaaatgatcagcttcaaaaaacgcttttccttctacaaatcttctgatcagcttgccgtattccattccgatctttaatttccgctcggcgaaaggaaaagtgctgagccggtcattgagttcagatatatattcattgcggtcaaacagcactttgccgttgatgatccaatctatgactcttctatttgtcccaagcagaatccattcctgaagcagagcatccgttacaatatgtaaagaagcggttttttgttcgaattcataatgctttataaaaagaggttcatcagcctgtttgacaatgacaagcatgaccgcatcaaagttatccgtgatggatgatgctttactccttctctcaatcataaggacggccagcgtatcgggatgacttgctctttcttggtaaattggacggagaagattgtccattacgattcctccaatgcgattgtttcactagctattgtttctacatttctatgataaaacatgaaagtccttttttctaaacacattgcactattataacaaatttcctttcaggtgccatatttattcttcccttttcttacgaaaacatgaagaatataccatctgttttgtgctatagttaaacgagagggggatggacatggcgaaatactcaagcaaaattaataagatcagaacgtttgcgttaagtttggttttcgttgggtttatcattatgtacatcgggctgttctttaagcagtctgttttgcttgccagcttgtttatgattctcggcctgctgtcgatcgggctcagcaccgccgtttatttttggatcggcatgctgtccacaaaagcggtccgggtgatgtgccccgcttgcgagaaagaaacgaagattctgggcagagtggatatgtgcatgcattgcagagagccgcttacattggataaaggattggaaggcaaagcgttcgatgagtcttataacagaaaaaacagtgtaaaataaacgaagctgaccgtatcaaagcggtcagcttcgtttagtggttttcttttttggaacattcttggcagacgccgtaaatctccaaacggtggtggcttaccttaaaccccgtgacgtgagccgcaagctgttccacttcgtcaagcccgggataatggaagtctacgatttttccgcagctttcacaaatggcgtgataatggtcagaggtgacaaagtcaaatctgctggacgcatctccgtacgtcagttcctttacaagccccgcttcccggaatacacgcaaattgttatacactgtcgcaacactcatattagggaatttcccttccaaggctttatatatatcgtccgctgtcggatgtgccatagaatccacgagatattccagaatggcatgacgttgaggagtaatccggactcccgtatccttcaacgtgtctaaggcttcttttaattcatgtgcagccatccgtcatgcacctctcttctaaaaaagattcttactttataatgtttataattagtgtacatcttttctcggtctcctgtcaaatgtaatctgaagaaaaccccgtgagttcagcatttgtccattaattagacgcaatttgttccaattctcgaagcgcctcggcaacgtgatctttcacctttacctttctccactccttcacaagacggccttctttgtctaacaaaaaagtggatcgctcgatacccatatattctttcccaaaattcttcttcagcttccacacatcaaaagcttccgccaatttgtgctcatcatcaacgaggagctggaaaggaagatcgtgtttttgcttaaatttttcatgtttatcacggctgtcagggcttactcctatgataaccgcatcaagtcccgcgaaactttcgtgctgatcacggaaatcacatgcttccgtcgtgcatccgggtgtcatgtctttcggataaaaatagagaacgacgtacttccctttaaaatccgtcaatgctacttcttccccgctgtcattcactaatttcatatccggtgctgtttgtccgatttcaatcgtcatttcttatacctccgggttttttattaagcgtatccaattcacgttaagattacaaccgttatcctcccgctcttttctggaagcatgaaccgttgtgctcgcaatgaagcatgctacaatagaacatgatgtaaggagatattaggagggtcattttttgtatacaaaatcagttgaacttcataaggaagcgttagagcatatcgtcggaggcgtgaacagcccgtccagatcctataaagcggtaggcggcggttcacccgttgcgatggaaaaagcgaacggcgcttatttctgggatgtagacgggaatcagtatatcgattatttagcggcttacggcccgattattaccggacatgcccatccgcatattactgaagcgattaaaacagcggccgaaaacggcgtgctgtacgggacgccgaccaaacatgaggtcactttcgcaaaaatgctgaaggaggccattccttcacttgataaagtacgattcgtaaactcaggcactgaagcggtaatgacaacgatccgggttgcacgcgcttatacaggccggacaaaaatcattaaatttgccggctgctatcacggccattctgatctcgtacttgtcgctgcgggttccggcccgtctacgctcggcacccctgattccgccggcgtgccgaaaagcatcgccaatgaggtgattaccgttcctttcaatgacattgaaagctacaaagccgcgctggataaatggggttcggaaattgcagcggttctcgtcgagccgatcgtcggcaacttcggcatcgttgaacctgaagaaggatttttagaacaggtaaatgaattgacccataaagcgggcgcgctcgtcatttatgatgaagtgatcacggcgttccgttttatgtacggaggcgcgcaggatcttcttcaagtgaagcctgatttaacggcgctcggtaaaattatcgggggcggcttgccgatcggcgcttacggaggcaaaaaagagatcatggagcaggttgctccgctcggcccggcatatcaagccggcacaatggccggaaacccggcatctatcctatcaggcatcgcctgcctggaagtgctgaaggaagaaggcgtttatgagcggcttgatgagctcggcgccagacttgagcaaggcattctcgcccatgcggagacacacggcattaccatcaccgtcaaccgtttaaaaggcgcgctcacggtttacttcactgatgaaaagatcgtcaattacgagcaggcggaaaatacggacggagaagcattcgccaagttcttcaagctgatgcttgagcgcggcatcaatctcgctccatcgaagtatgaagcttggtttatcacaaccgcacatactgaagaggatatcgacgccactttacaagccgttgaagatgcgttcagacatatgaaaaaataactgctggaacaagcgggagcccggggcttccgcttgttctttttgtccgatttgtgagataatggttttttcaaaaaaagaccttgaataattggtatgatccctgtatattactttattgtttagcaaatcagccgacagggaaatgtaagtgtcagccgttcgttcggcacataatttattagagaaaggaatgcacgcacaaaccaatgaaacttggtgcccgcatttttaaaacagggattgcgattacgctcgcgctctacttagcatcatggatcggacttccgtcgccgatctttgccgggattgcagctatatttgccatacagccctctatttacaggtcttttcttatcattattgatcaggttcaggcaaatatcatcggcgctgtcatcgctacggcattcggactgattttcggaccgagtccgattatgatcggattgaccgcagtgattgtcatcacgatcatgttaaaactgaaaattgaacacaccatttcgattgcgctcgtgacggttatcgcaattttagaaacaccgggaaacagcttcctgacgttcgctctgatacgaacaagcaccgttattttaggcgtgctgtcttcttttattgtgaaccttgtgtttcttccgccgaaatacgaaacgaagctgactcatcatacggttgaatataccgatgagatcatgaaatggatcaggctgacgatgcgtcagtccacggaacactcgatattgaaagaggatattgagaagctgaaggaaaagatgatgaagcttgatcatacgtaccttctttataaagaggagagaagctactttaagaaaacgacgtatgtaaagtcgcgcaagcttgtattgttcagacaggcgattattacggcgaatcgggcgcttgatacgctgaaaaagctgcaccgctatgaaaacgagatttatcatatgccggaggaatttcaggagacgctgacagaagaaattgattatctgcttcattggcacgaaaggattctgatgcggacggtcggcaagatcaaaccgcatgatgacgacgctgaagaaagcataagatataaacagcttttgacgaagtctttcttgaaaaatcagcagaactgcgaggatgaactgcttgattacaatatgctcagcattatggctgcggttgcggaataccgcgagcagctggagcatctcgatacattaattacgagttttcagacataccacccgaaagacagcgaattagaaacagacgatgatgagtaacccggtgcttccgtaaaaccgggtttttttgcattcaaaaaaacgtatgccgcccattcggacggcatacgtttttgtatcagttcaaattctgaatcgtaaataagtgtctgtactggccgccttgggccattaattcctcgtgcgtgccggtttcgacgacggcgccgttttccatgacgacaattttatccgcgtgcgtaatcgtggacagcctgtgggcgacgataaatgtcgtccggtttttcgcaagcttttccatcgcttcctgaatgtagtgttcactttccagatcaagagccgatgtcgcttcatccaagattaacagcggcggattttttaagaatacacgcgcgatggaaatccgctgtttctgcccgcctgacaatttgacgccccgttcgccgactttggtttcataaccttcggggaaattcataataaattcatgggcatttgccgctttcgcagccgcaaccacctcatccagagacgctcccggtttaccgatggcgatattttcacgaatcgtctcactgaacagaaacgtatcctgaagcaccattccgacttgattgcggaggcttctcgcttcataatcgcgaatatctgtgccgtcaatcagcaggctgccgccggatacatcataaaaacgcggtatgaggctgacaagcgtcgatttaccgccgccgctcatcccgacgagcgcgacggtttccccttttgtcacctttaaggaaacgtcctgcaaaatcgtttcttttccttcctcataacggaacgagacatttcggaattcaacttcgcccttaatgccgtcagcttttactgcattcggtttatcagtcagttcatacggctcgtcgataaattcaaatatgcggtccattgaagcgatcgactgggtcagcgtcgtcgatgagttgatcaatcttctgaccggattgtacattctgtcaatatagccgacgaacgcaaccatcgtccctaccgtcagcggaccgtttatgacaaaataacccgcaaacgcgataacaagcagcggcgccaaatccgtaatggtattcacgactgcaaacgtttttgcgttccaattcgtatgacggatcgctctgtccagaaaatgtccgtttttttcatcaaaattggcttgttcataatcttcaatggcaaaacttctgatgacgggcatcccctgaactctttcgtgcaaatgtccctgaacttgggcgagtgcctgagaacgctcacgtgtcagttttcggaggcggccgtaaaagtatttcactgaaattccgtataacggaaacaaaatgacagatatcaatgtcagcttgacatcgagtgtaaacataatgcagatgacgatcagcaccgtcatcatatcaagccagatattcatcagtcccgttatgacaaagtcttttgtctgttcgacatcatttatcacccgggaaatgacttcgcccgttctcgtgttggcataaaacctcaggctcaatttttgaatatgatcaaacaatactcccctgatatcatagagcacccggctgcccgtccattgcgcgaagtattgccgatagtactctaccgggggacgcagaattaaaaacagcacaaacatgatacccatgatcgtgaatagcgatgatgttttagcgcttgccgttccgctcccttgaataatgtcatcgaccacgtattttaacagcagcgggagagccagcgggatggagaattttatgatgccgattaacactgtgataaaaatttgttttttataaggttttacaaattgcatatagcgtctgattacgcccacactttatccccctctctctttaaggcgtgtgagcccatgtgaaaaacctgttgacaccccaacaggttttttattgtattctttattttgtatagcgcagataccgttcataccacatatcaacaaattccggagcaaacggtcctttccgctgatgaatccagtgcagcagcgtattcagatactccttcagaatgctgtcgatctctttagggtaattcattgatttgcggtggtcatcgtattcatcctcgtcaagaatgttatacgtcatatccggaaacaccttgacatccaaatcgtaatcaatatatttgatggcctctccgtcataagcgaacggcgagctgatgttgcaataatagtgtactccgtcatctctcagcattccgatgacgttaaaccactgacgggcatgaaagtagcagatcgccggttctctcgtcacccacgtccgtccgtcggattccgtcaccattgtccggtcgttggctccgatgatacacaattccgtactttttaaaatcgtcgtttcattccaaattcgatgaagcagcccgttatgcttatagctgtgaatttgaatggtttctccttccttgggatatcccatatttctcccctactttctgtaaagccctgcagtcaatgcagccgcaattgctttccgacaagtcttttcactattataacgttacgaattaaaaaatgaaaataaaagaaccactccgcttccggaatggcacattcatttctgcacataggaagacggcttttccgtgctgcgataagactggatgacttgctctgtctgcctttggaataactcctgtatgccggccaggtcttttcgctttgtcgcaatttcgtcctgtacattgtccagctttgcatctctttccagactgatgagttccgcttccacctgccggcagcggtcaagttctgactgcagctcgagaagctgatccatgattttcatctgttcacttacaagcttttcaaactctgacatcgggttcctccttaggcttttaggttgatactccttaccatttcgattttacgccggaaaaccctttgactcattctgtagaggaatcacaagttttgtcgttttggcaacagaaaaaagcacttccatccgaagatgaagtgctttttcgtttcagtgattagctgttttgctgtttgttttgttcagcagattggttttgctttcttacctgctgcacatcagtttcactgccgaattcagtgccgtattgaccctgaccggaagctgattgctggttttgtcttttcacctgctgaacgtctgttttgctgtattttgagtttgccattgttatcacctccacgcactttagaatgcgcaggagatgataaggctattcatctttttttaaaacttatacgagcagagagcgtccgccgtcaataatgatggtctggccgcggatcatgtccgcttttgaagaaactaaaaactccaccgtatcgatcatatctttaatttcgaccattctgccggccggcgtattttggcgggcatcttccagcagttcatctctgttagggaaatgcttcagcgcgtccgtatcaatcgctccgcctgacaccgcgtttacgatgatatttttcggagacagctcaaccgccagataacgggttaacgattctaaagcggcttttgagactccgaccgtcgtatagttttcaagatagcggatgctgccgagcgagctgatgctgacgatgtggccgcctccgtttttctccatcatctttgccgcttcctgggcgcagaaaagcaatgctttcgcattgatattcatcgtccagtcccagtgtgtttcttcgagttccatgaccggtctcagcacgcctgaagccgcattattgacgaacacgtccagtctgccgaatgtttcgtcaatctggcggaacatgtctttgatttttgccggctggccgacattggctttaatgacgagcgttttaacgccgagtttttcaatttcttcggcggtttctaatgccgctttcttactgcgggcataattgatgacgatgttgtatcctttttccgcgagtctgatggcggctgctttcccgacgccgcggctgcttcccgtaatcagtgcgcatttattttgttccatttttcctcagctccttgctgtgtatagttcttttcattcaacaaacaataaaagcaatatgtgttgaaaggggtcttttatatgtatgtcggacgtgatatgggcgaattggccatgatgcccaaaaaagattggagagattcagagctcgcctatttccatcatgccttccagcaaattatgccgtatttaaacgaagaaggccagtccaaataccgggaactgattcaggaaatcgaagcccgcggcggactgaaacggaatgaagcggattatggccacggcactcgcgtcagctatgactgacgctttttacaggcggccgctttcttccgccattttccatatcttttgatgggaaacgggaaatgcgtattcctcgagctcctcttttgtgacccgtataaattccgttgtatccgacacttgttttactttaccgaaaaagaccgaaatattccagacgagatgggtgaaaacatgttctacgatgccttccagctccccgatttcagcggttgttcccatctctttttctaaataggcttcaagctgctctctttcggttttgattcctttctgagtttcggtattcggaaactcccacaagttggcgagcaagccttttggcggccgtttatgaatatagacatcgccttgatcgtctgtcagcacaacggctgccattgtttttattccgggctttttctttttgcttttaacgggcagctcccgctctgtcccttccgcaaatgccgaacagtgcttttgtacggggcaaagcaggcaggacggcgatttcggggtgcagatgatcgcgccgagctccattaaaccctgattgaattcagatggtttttcatgagaaatgaaagcggataccgcctgttcgaaaatggttctggttttaggttttgcgatatcgtcccatatggaaagaattctcgacatgacacgcatcacattgccgtctacggcgggaatcggtttgttgtatgcgatgctgagcacggcgccttttgtataagggccgacgcctttcagtccgccaaattccttttcctcggcagggacgactcccccgtaccgctcatgcacttcttttacggcactttgcagatttcttacacgggagtaataacccagcccttcccaggctttgagcactttttcctcatcggcttcagcgagcgccgaaacggtcggaaattgctcaacaaaccgccggaaataaggaatgacggtatctacgcgcgtctgctgcagcatcacctctgacacccacacccgatacgggtcctgattttctctccacggcagaattctctgttctctttcgaaccatgtaattaagtcctcgcgaaatttgtctatatctttttgtttcattttttcttcaagtgcgttcatatcttctcctcagatgtttcgggttccgcttttcttgacaccgtattttggtgtaaacttagggcacgttacgataatatgttacattaaatagtgataaagaaaaagcggaaacatatgagaacggcggataaacgccatgattgggcaaacagaaaatggggaatatcttataatgcgaaatatgcgggcaactgattgttaacgcctgctaggaggtcaacaatggatactggcactcacgttgtcatgggtatcgcgcttggcggaatcgcaactcttgatcctgccgtcggcatgcacacccccatgtctcaggcagttatgatcgccgctcttgccggctctcaggcacctgatattgataccatattgaagctgaaaaataatgccgtttatattcgaaatcatagagggttcacgcactccattcccgccgttttattttggtccgttctgattccgggtattttgtttatgttttatccggaagcgaactttttgcacctgtggctgtggacgcttctcgctgtcgttttgcatgtgtttgttgacatttttaacgcgtacggcacgcaggccatccgcccgttttcgcgaaaatggatcgctctcggtttaatcaatacctttgatccgtttattttcgtcagccatttggccgcgattgccgtgtggtatatcggaggtcatccgggcgtgacatttctgatgctttatatcatcctcgcaggatattacgccgtccggtttttgatgcagctgcggataaagcgaaggctgcgcgaaatgattgaagaggagattgaaaccatcattatttcgccgacgatgaaattcaggcagtggcgtatcgccgtgacgacggcgcatgccttttatgtcggcagaagctttgacggccatgtcgtgatattggatacattcaatcgcgtgcccgttccggaaaccgatgtgatgaaggccgcgaaacaggacgaaaatattgcagcctttctttcattttcccccgtttacaggtgggaggtcgatacctttaaagatcattatgaggtgcgctttattgatttgcgctaccggagcaaaggccactatccttttgtcgccatcgtccacctcagtcatgatttagagcttctctcttcttacacgggctggattttcagcgaggaaaaattgcagaaaaaattaaagctcggctctgtttaagagccgggcttcttttgtcttctcacatatatagccgcaaacacgaggctgatcaccgatagagcggccgcgggtttaaaaaacggcgggaaatacgttaattgaatatcgttttttcctttttgcgctttaaatccgataaaggaataatccgctttttcaatctgctcttttctgccgtttatcttcagctcccagcctttttcatatggaatcggaagcatgatatacggcgcgcgggttttgttatcatacgagatatgaagcgtatttccgcgccagctgagatcggcccgcggttctttttccgcttttcggtatgcgcttttcagcgtatcgtaccgttcttcataaagcgccagtctgtcaagctgatacgatcctttcggcagacggatttggatgttttttgttttcggcactctgacagtaagatcgttgacacctgttttgtaaatggattgattcgattttctcgttgtcgtgtaatcgttcacttttaatgtaaagccctggtccttcgctttattcttcaaataaaagctgacgtaataatcgccgccgtccatcttagcggcttgcggcgtaatgatcaggccgccgccgtcttcgtttaccgtcaggatgccgttatgataatcgccatgttcggccgctacctctgcatggcggatcatatttttcgcctcagtcgcttttttcgtgttggttgtgcttgattccatgacgatcccgtcaagcattgcccgctccctggcaagggcgggcgcttttttcaggccgccctcgttatatacgcgatcggctgtccgtacgaacggaagcatatattgattttgataaaccgcataatgggatgattccatgatttttttgaacccgtacggcacgccggcctcgtttgttttttccgtcatataatattttccgtaaagcaggctgtataaattagccctgtttcctaatgtcgcatagcggctgacgctttctctgcccatgtcaatctggaggtcgttccagtaaaaggacagcagattgcggttcaatatgcttgagtatacgctgaatccgttgaatccgtatatgatcggggtgttattgaaaacaccgttcatccaatctaaacgggcaaacggatcagggtctttttctttcagacgctgaatgagctctgattgctctttgcctttatagtcagcacccgtcataaaggtatgcgataccgtataaatcttcccgccttctgataaagcatatttttcatatgtattagccgtaagcacagccgtaagcaaaatgacggcatagacggcgggcaccgcgcctttcagtcttgtctttgctgcaaagaaagcggctatgctcagcaccagaagaaggatgacgggcaggttggcgtgatcagaaatatccagactgtaccgcctcacctggctccaatagagcagaacgacgagtacggcggacatcagcatactcttcatgctgatgtctgaaagcttagaaagcccggctgaaaccgttccggcaatcgtgaagcacaggacgtattcaaacctgttctgcggagctgaaaaaccgttaaaggcacttgccgcgaacggactgaagtgaaacagaatatacagcagactgattcccgcaaacagccggaacaagcggtttttgtataaagtaaatgtaaatagaaaaagcaaaaaagccgccggcaggatgataatccggctagaaaataaaatattgtcggaaaaatcaagccatgcaatatgctctgaatacggcggccgcagattatgaaggtatccgtacacgacaggaataaaggaaactgcgcttatgccgaacccgagaaggcccgacagaataaatatcctgcattgagtgagccttttcgcctcattgccttcaagggggatcatccacctgaataagatataaacgccgatgaaaatcagattaatatacgcaaaataaaagttgttgatcaatgtcagcgcacaggcgaagataaaccacgccggctttttttcccggatgattttttccgcgcccaacacaagcaacggcagccacaccatactgtcagtgaaaaagtcccaatatacctcatgccggaagtagataatcgagaccccgtacaacacggcgcccgtaaaagcaggtaccgtccgtttgacgaaataacggaacacacacgccgccgtgaatatgatcaaactctgcttggcgatgctgataaaaacggaggcctgcgcccaaaacagcgcatcagcctcacccgtcagctgaataagctgcaaaaagcggacagcggcggagataaacaggaatagaaaagaagtagagaaataatagccgagctgactgtacacgcccccgcccagtccgaacgaatagctgtaaaacagcctgccgttcatatattgatcaaacagcagctttttgaagaccgccatttgggcgatcccgtctccagaccccgtcatatagcggccttgcgaccactcttttaagaaaaaaatatgagcggctgccgcagccagcacacaggctgccggcaagatccatttattttttttcatacaacgtccccagaccctgcgcacagcggcggctgtttaatggttccacttgcgcttttttgtataattcgtttcattttgttctccgtacgttatattcgcttctttaattaaatagtgcgggcgtttttttgtttcatagtaaatccggccgatgtattctccgatgatgccgagactcaaaagctggatgccccctaaaaacagcacggcggaaataatggtgaagtatccgggtacggacacgccgtgtgtcagaatatgaacaaaggtcgttacaatataaaccatcgatagaagcaatatcagaataccggtgaaaaagcataccctaaggggcttgttgttgaaggagacgacaccgtccattccatagttgaacagattgctgaatgaccatttggacgtgccgttcttcctttcgacattttcataaaatacgattttctggtcaaacccgatccagcagaacagccctttcgagaaacggttcccttcactcagcttcaaaagggcatcaacggcctgccggctcagcaggcggaaatctccgaccccgtcacgcaggtccacttcgacggctttgttgataaatttataatacagggaagaaagcacggaacgcacggggctgtccccttttcggttgcgctgcgcgatgacttggtcatacccttcttcatagccttgaatgaagtctttcagcagatgggtcggatgctgcagatcggcgtccatcacgattaccgcttcgccctgcacgtgttcaaatcctgccaaaatggccgcttctttcccgaagttgcgggaaaaagatatgtatttgacgcgatggtttctggcggccagttctttaatctgctgaagggtgtcatccgcgcttccgtcattgatgtagaaaatttcatagtcataatgaatcgtctgaaactctttttttaaagattcatggatgagcttgacattgttcccttcattgtaagacggaataataattgagattaacctttgtttcatgaaggcaccttctttgtattattctttttttaggacggccttaaaggaattgtccgcaaaacttcagtaaggcttttcctttttttaatgacgtttaaaccatttttttgttacagggaaagaaaattttttctgcatatggtttatattttgtcatgtttttcggcagatatgagaaaaaaaagaaaaagtctgtacgcgggacagactttattgctgaaggtattcatgaatcaaatggctgacgatgcgcggtttttcgtgaatgacccaatgtgaggcatcatctatgaagattaagtcgccgtttggaatcatccgttttgtttccttggcgagctttttgctcagcgcttggtcattgacgccccatattaatcggtacggaacgggcattttaagcggaacggcagggcctaaaccgccggctctgatcgcccggtaccagttcagcatcgccgtgagcgctccttttctgccccaagcttctttgtagctgtcgacatcttcccgtgaaaaaagcgccggtcgttcggataagccgatcgcgtgatccaatacgcggtaattgtcttcagacaatctccgttccggcttttccggcagctgaaagaacgcgatataagagcttttcttccactgcggcgggtagaacggtgtgaccttccgcataaccgccgggtgcgggatattgaccgtgattaatttttcaacgtattgcggccgcgtggatgccaaatgccaggccacggctcctccccaatcgtggccgatgacgacggctttgtcatctgtaaaatgcgtgatcagcccgataatgtcgtctctgagcgtatcaatggtatagttttcaatgccctccggtttgtcactgagattatagccgcgctgatcaggcacgacaacatggtatccggcatccgccagcggtttgatctggctcttccagccgtaccagaattccggaaacccgtgcagcagcaccgccaaaggaccgtctttcggaccggctgaagccgtgtgcagcgtcactccgtttgtttcgatcatgtgaaacgtaatgtcattcatcgattctcctccccgtttgtttcaatcttctttctgttaagacgatgatcagtacgctgatcgcaatcaataatacggcctgaacgatcaaggcgaacggctgagtcagccggataagcaggctgcccgcaaatccagctgccgccgatataaggccgaacaaaatcatgagaagcgcactgaatcgattgccttctttccactgcgactcatccgccatagagcgcttcgtccgatatccgtacaggctgttgatcgacttcggcggaaaaaatgtgactaaaatgccggccgcagccatcagaaggccgccgattaccattatcatatctgtcactctccttttcatcttttacgaaaggaaaggcgaaaagtttcagaaaaaaagcaggctcattcgcctgcccgaatctttatttttgagttaagtcggccgttttcacataacctgctttcccgccgtatgtgacgtacgcccatttacggtcaaatcctccgtcatggctgaacccccagccgagcacattgacggtttcacccgctttaacggacccttttttgccggtttccaaagtcggcgtataaaaagcggtttgtttcgccgtcaccgccttcaccggctgcttcatcagaaaatgtgtggagatataggctttgtgacctttgtagtcaatctcagcccaatctgctccttgaagccgtttaacctttacggaatcctctgaacgaagcgtgccgataatcgacccttgtttatttggttctttgcggacgttaagttctcctgctttcacgatatatgtatctgctgcggtgtctatttttgtctggtgaactgctgcggcattcgctgccggatcgaaaaaaacggtgcctgcggctaaaaataagcaaagtcctgcggccggaataaatgcggttaacccctttttcatgttcattgtggttcctccccgctattttataagttattacacatttccacattccgccggtcgccaaacatgattttcctatttcttttataaaaaaaaccgccggacgatatccggcgggtgcactgctatgttaatgcaggagacccctgctttgatccaaataatgagaaacgtcttcccgaacgctctggaacatatggagcttgctgccgtatgattcgatccattccttgacgacgcgttccgtcatttgctctccttgatacgggcggccggcttttgcgtaagtcgcttcgaaatctccccataaaagctcaacccaagttcgcgcttgcaaatagctgagcatgtcatttttctcaagcagcaaattcgtcagtttgtcgatatatgtattcatgtctctgtctcctttccttgggaaaacctgctgcttttacgcagcttgtcacaggcatatactaactttacgtcttcagtccagaaggcgcaaccttttgatattggccgagggggaaaacaaatggtccggaacaaggcaaaaggatttcctaatcagaacaataataagtttgaaggcgaaccgcgggcaaaggatgactacgcttctaaacgggcggacggttcaattaattcgcacccgcaagaacgcatgagagcttcaggcagacgataacacacacaccgtaagagaccgggaatgacccggtctttttttttgcggaaaaaaacatccttttgcggtcataacgctaaataaattccataatatgttaaatattaaaccgaaagccggtagacaaaaaaggaggggttttataaaatgaagacagtttcaaaacgattgctgagccttaccgcattcttactgtcagtttcattatttgctgtttcagctgaagcagcgggcagcccgcagacatctgtatcaaacagcggtgaggagtttgacgcacatcagattcagcctgtacaaacaacacagacatcccccgcttatgaaggaacgggcctcatcaaaagacagcttgcacaaaacagcaaagctgacatcaagtcattaaagccttccagtattattgggacagacgaacgaatcagaatttctcctacaacatcatttccatatcgagcgacagcacagctgaccgttacatacagcggcagcacaagcacctacggatgcaccggtttttttgtcaatgccgacacgatcgttacggcgggacattgcgtgtatgaccagaaaaacggctgggcatcgaaaattacggcagctcccggccgcaacggatcatcgtacccgtacggctcttattcaggcaagacattctacagtgtcaaagggtggacagaaaacggtgacacaaactatgactacggggcaatcaaagtaaacgggtcgcccgggaataccgtcggctggtacggctaccggacgaccaacagttccagtccggccgggctttcctcaaccgtgacaggatatccgtgcgacaaagtgtccggttccatgtggtcggacagcaagccgattcgttctgccgagacatataaactcacttatacgacagatacgtttggctgccagagcggatcgcccgtttaccgcaattacagcgacaccggccagaccgccattgcgattcatacaaacggcgggtcgtcttacaatctgggaacaagggtgacaaacagtgtattcgacaacattcaatattggtcaaatcaataaagcttttgttttctttctcgccgcggccgttttatgcggatgcggcaaagcggatgattccgccgccaaaaaagtattgcccgttacgctccatgttgaggatgcagacggttcaccggcggccggtgtgacggtcaccgtgatgaaagcggcggagtcagatcatcagccgaatatagaccgcggagagataataggcaagactgatcaccacggcgagattgcatggaaaagcggcgcgaaaggaacctatgccgtcgtttttgaaaaagacggagtaccggaaacccggaatatgtccttagctgagaatgataaacatacggtgatcagcattacattgaaacactgaaaaaagcttgcaggcggaatatcccctgcaagctttttgttatcctttatgcacttggtattcataaacatctttcttctcagacagatgagcgaacgtggaaagcacaaggccgagagccgtcatcagcgcaccgccggcaaacagccatgagtaagatcccgttcccccgagaatcaatccgccgatccaggcgccgagcgcgtttgccaggttaaaggcggaaacgctcacagcagcggcgattgtcgtgccgttttcagaggaagaaataaccttggtctgcaaaagcggcggcgtgccgaacgcacatgcgccgaacaaaaatgtcgctgaaacggcggcggcgggaaaaacagcgatataagggaaaatcgccaagacgccgatcaagccgatcatcacaccgatcatcgtgcgtgtcagcagtttgagcggcactttccccgcgaagaaattccccgccactccgccgagaccgtaggcaaataatgcgcctgtgatgccgactgtgccgaaccccgctgcatctcttaaaatcggctcaataaacgtgtaagcgataaatacgcctgagtagccgagaatggtgatcgcaaaggaaaaaatcacttgcttatgcttaaagacactccattcattcatcagcatcggaatcactttcggtttccggttcggtacgaccagcatcagtccgatcagcccgatcatgcctaaaacggaaataatgaaaaagacggcccgccagttaagggcatcccctaaataagagccgaacgggacaccgagcatcagcgccacggttaatccgccgttcatggaagccgcggcggcggaacgtttttcaggcggcaccatttcactcgcaaacaccatggcgatcgcaaaaaaagctccgtggatggatgcggataaaattctggaaatcgccagcacggcgaagtttggcgcaaagacgctcatcaggttggcaaggacgaagatgcccattaaccctagcagcaccggctttcttggcagcttaaccgcgataatggttacgatcgggcccgtcaggcagacgctcgccgcgtacgccgtaacaagcatgcccgctgaagatacatgtatatgaaagtcatcggcaatcgacgtcagaatacccatgacagcatattccgtatacccgatggaaaatgtgcaaatcattaaaacaaaaatcattaatttcacagatggctgtttcattttgatattcaacgcaaatcgcctcctttttatttaaaaaacaacgaattccatcttaaaagatatcaaaaatgaattcaatcattttttactgaaaggttgaaacgaatgtgcccgaaaagaaaaagaggccggaaccggcctcttttgttattttttttcttttaaaacggaaatcggcagtgcttcttccccgtcagacggggaagatctgtgtccccaggcgaatacgccgttgatgtaatcaatacggaaagtgtcatcagaaccttctatctgatacaccccgccgggccgaaagtcttccgggttcagcatgtaagctttggccatcgtaatttttcgttcaagcacggccagttcatttacaatgcccatctgttccgcttttcgcgctttttccgtcagtcccgcaatttctgtctgtagttcatgaggcgtcatttgactgtatcgtttgtccatttcagtttactcctcttcctgcaagaattgatcaatatcgtcaatcgagaatccttttctgaataagtactgtttaaccttcattccgctttcataactgccgtcatagcggtatttcctgatcgctttttccgcatgagccttcagagcctccatctcggcttcatcatcattttcatactccgtctgctccagagcggcattgatgacgtcgaaagggaaaccttttcgctgaagctgcatctgcgcccgctgtttgatctcttttgtggacagctttttgtcctttttcaggattttgccgatatgtttcagcgcttcttgtatttgctcatcaaatgtaaacgcactgagcgtctccttgatggtatcgtcgtctattcctttcgctttcagctcgcggaacaggacgtcagggcctttgccgtttgtttttttgtgggtgctcgcataggcttcggcaaattctttgtcatttaagtagcggtaatcgtacagtttatggatgacttcagaaatgaccatgtccggtgtttcttttttcttcagatgatcccggacttctttttcagagcgcatccggtatgataaaaattctacggcgcggttaaaggcttttttcacgtcatcgccgtactggatttcaagaatgtcaagctcgtccagttctttcccttttttcaggtcaaaacgcacaagcacgtcggcgtcgacgctgaatgcatatttctcatcaagaaagatgttgaagcgctcggtatttttcttttgggtcgatatttttgtaataaacggcatcccggtctcctttcccgccccgatgttcaggcgtttttctttttggcaaatgaggtacagtatatgtatcaacgtgtaaggagagatggatatgaatatcgcgatgacaggcggcactggttttctgggccggcatctgacaggtgtgtttacccgccggggacatcatgtctatattttatcaagaaaacagagagaaaccgaacaaaaaaatgtgacatatgttcaatggctggccgaaaacgcggcgcctgagcgcgagcttccccctattgatgtatgggtgaacctcgccggcaaatccatctttgaccgctggacggacacaacgaaggaacaaatcatctcaagcagaatagaagcgacgagagaagtcagacggattataaagcagcagccaaaaaaaccccgggctttgattcaggccagcgccgtcggcatttacggcacaagcacagaaaaaacgttcaccgaacagtcagatacgtcaaatgaagattttctcagtcatacggctcatatgtgggaacgtgaaggccagaaaattgaagcgctcggcatccggacggtatatgccagattcggggtgatgctcggtgaaaaaggcgccctgccgctcatggttctcccttataaactgttagccggcggcaccatcggctctggacggcaatggctgtcatgggttcatgtggatgacgccgcggaactcatcgcttatgcggcggagcatgatgacttgtccggtcccatgaatgtgacatcgccgaaccccgtggaaatgaagcaattcggaaaaatgatcgcaagcgtcctgcaccgcccccattggattcccgtaccggaactttttctggagaaggccttgggagaaatgagcctgctgatcgtaaaaggccagcgcgccctgcctaagcaggcgctgacatccggttttcaatttacgtatgaagaacttgattccgctttaaaggatctcttatctgcataaaaacggaaataaaagccaatcctattggtattctgttttgaaggagggtcttcttttatggaaaagaagcgcgaaaaacatcagcagggagccaatctgaaaaaaatgcaggaagtcctttattccggtgaattcaaaaaagcggaaagagcagccaaacggaagtaaactgaataaagatcggaaccgggcagatactatgtttgtttgatatcacttttttcagggggcgattgatatgggcagaaatcatactcacaaaaaccgtgataaaaacaaacaaaaacttcctcaagttccggatgctttgaaacgcgaaacagacggcacatatgaggaatattcaagcgagcttgctgattccgctgaccgcgaagcgcaggcgcggatgaaagccgctgacaacagagctaaaagcaaaacccgctaatacgaaatccccgcctctgtatagagacggggattttttttacagttcggtaaacaggctttttgccggcgtccgttctttcgccttaggctgttcatccggatagcccgtttgaatgatggcggcaaagcgctcattgtcagcaaggccgaagtcttggtgcaactgtttgtcatacatgatacggccgcttttccagaccatgccgatgccgttttcatgtgcgagaagctgaaggttttgaatcatgccgctcagcgccgcaaaatcatcgtttctcgtaaattcattttcatcttctttaaagacgaccagcaaaaatcccggaacggcgctgagattttttctcatgttccgctctttttcctcgttgaaatcatcttttatctttttgaaaaatgagacgtagctgtccgcaagctttgcttttcccgcttcgcttgctgcgtagataaaacgccatggctccgtcagcctgtggttcggtgcgtaaacggcggtttcaagcatatctaatatgacttcagaaggtacggtttccggtttaaacgaccggatggatcttctgtttctgattgtatgtgcaagactttcgttttgctgtaattgttcggttttcggcatgccgattcaccttcctatccaaatgaaaatgattatcatttataatataacggatacgaccggcttttgtaaaccgttacggaagctgaaaattgattgtttcggcatacacggccgttcccgtcatcttgatgttcatctctccgttttcctccgcgatcctgatttccacttttccgtctttcccgatttcctggccttgttcaattgtgaggcattcggcttcggagcctccgtattgccgcatataggctgccatgacgcctgaagcggttcccgtgacgggatcttcggtcgttccggagaaaggggaagaaaaatggcgtccgtgcagatcactttccggatgaacggtttccagagaaaacggatgaacgctcgctttcggaagatcgcgcaaaacagcggggaattgtgcgttgtccggcaccatattccgtgatgctttaagtgatctcagcggaacaatcagtgtccagatccccgttgatccgtaaacaatcggcagcccgctgtgaaaatcctcagccgtaatcccgagcgaggccgcaagcttttctttgtcgcccgtaaacggcagaaattgcgggggagcctgttcgagtgtgatgtatacccggccgtttcgttcagcggcttttgcgggaagaatgccggcttttgtttcaatttgatatgtctgatcagcctgaagccttcccttttcaattaatgcgtaaagagaggcgacggtagcatgtccgcataaattcatttcatggccgggtgtaaaatagcggatgcgcagatcggcttctccgcttttacagagaaatgaggtttcgttgtaccctgccatttcggcgatcatctgcatctctacatctgaataatcatctccgttaaagacgattcccgcgggatttcccaaatccggaatattggaaaacgcttcatatttaaacacggttgcctgtttcattcatcagccttcctttcaccttatgatcatgttattcagtataacagagtaaaattagaatttttagttaattattcaaaaaaaaagacgccttttaccggcgtctttttttggtttgtccgatcaggcgggtgacgaggatcatcgtgacggacagcgatctgtttttgcggtacgccaagtatttcccgcgccactccggtttgtatttttctttaaaggcccgcagcccgctgaagctgtacatataccggacgttgttgaagatgacggccgcgattctttccgaccagaaagatgtaaaagccgttcctacgtttgacaaaggcgccatgcccatattgaaggtggtatagcctttttcctgcgcccagagaaacagacggatgaaaagcgcgtccataataccgttcggcgcgcttttccgataacgcatcaagtcgacggatacctcgccttcctgatacatcggcatcaggttggcaaaagcgatgatctccccttcctcgtctttcacgtaagcaaccggcgcctgttccaaataatcccggtcgaagaaaccgagagaaaaacctttctcttttttcggtccgagccattcgtccgaaatgtctttcagcttggcgataaactcggaggaaaacggcggttccccgacatgaaatgtgtagccttcgcggtcaaatttgttgttaatcgcccgcagccccgcttttttcttacctgagagcgtaaaggcctccatatccacgaacgcttcttctccaagcttgaagaagttatagccgaagtcatggtacagcgccagatcttcacgttcgatctgataaaacatgacactcagcccctgcttatgcgcttcattcagaaattcctcaatcacaagcggaaaagagtctctctgtcctgacggatccccgagcacgacaagccttctggaaatctggctgaacaataaaagcgctttgccgtcgcttgagaaataaaaccgcttatccccgagaaagccgagatggctgagcgcatttccgccttcttccgccaaaaaggacttcagccgttcaggatcggcctcttctccgatcggcttcgatcttttatgataaaagaacgtaaacaaaaggaaaaacagcggcacaacaataatagccgtcatcgtggcatatgtaatgtgcgaattgttatgaacgaaatagtcgtggcgcaagagccgattcattttatcccaaataaagccggcaatgagattgtagttaaacaaggcgataataaacagagcggccgcaaaaatcatctggccgagcgtatacgaagcctgctctctgataaactgccgctttaacagcacaagcaatacgatgacgacaggcagaataaagatcgcgctgatgttcaatccttttaagaaactgaacacaaaaccgccgaccagcgcggcaaccgccattgaataagaacgtttcgtccgtttgtataattcaatcggcaagattaaaagaatcaaagccgcgcttaacgataacgcgttaaacgcaaggagcgccgggcgcggaatatgcgggatgaccgtctccctgtcaatcggcagggcgacggacgccagcacgacgactcccgccatgaaaaccaaaagcgacagcgaaccgtaaagtaccctgattaagatagcgcgctggaatacgagaagcacgttcgtcgtttccacagcaggcgccatcttcggatttgattccagccgtttaagcgtattttccgttaaatcgccagccgcaaagaacagcccgaacacaaacggaataaatgaatacacaatccggtagatgacgatggatgtcacaaccgcctcctgcggaaagcccatattctgcatgccgagcagaaacagaaggtcaaacgaaccgaatcctcccggcacaagactgatgattcccccgatagcggcaatggcaaatacaccgaacacatggcggacatccgcgtgaattcccatgacatacagggaataatacatgacgacagccgccgcaaaccattcggcaaacgatgccccgatgtaagaaaaaaccggatgcctcggttttgcttcaccgtcttctgcgccagcttttttattgttgatcccagcggcgattaaggctgccggcacaataagcgccactccggcgataacagcccacagccacggtttctcacctgtaatctctccaaccggcagaacccgggcgatggtcaggatactgaagacggacagcccgagcagcgctgaggacgtaagccaggcgatgcctgcgacgaggcgttttacgtcattcgtatgttctttgtatagcatcgtccgcagcccgacacccgccagaccgccgaatccaaggacattgttaaaggaattggcgataaaagagaccctgaatactttccaattcggaatgttgaggcgaagcgtccgtttcagcacaaagtcataaaaggacatcgcgctgacggcaagaaggccgagcagaacgagaataaataaatcgtaacgctcaatcccgttaataatgtacagcgttcgtttgaaagaaaggtctgtcaattcctttttggactgataaatgactaaaagcaaaactgcaataggaaataatacttttaatatcgataaggcattctttttagtcagcaatgttctctccaatcatcataaaataacttatttattttaattcccccaataatctccaacatattatacactaccacctcacattcaaacaaaactcgtctgcaactttctttctctgattaaaatcagtaatatggtatgcaggagtataaatgaggaagtgagacgatggattataatctgcatgatacaacagtattaagcggcgatattttttctcctgaggaacgggatatttgggtgctgtacatgaaagtgatgacatcggcggggctcggcgatgtatcggagtggatgaagcttgatatgagcatgccgcaaatgaaagtgctgatgcttctgaacaaccacgggacgcttaaggtgagtgacatagcggagaaaatgggcgcttccctttcaaatacgacggggctgcttgaccgtttagaaaaatcatgtttcattacacgcgctccgtcagaagaagaccgccgttcagtcgtcgttcaattaacggaaaacgcgaaagatattttccgcagcctttatcaaaaaggacatgtaaaattgaagcgttcattggaaacactgaccgctgaagaaaaacaaacggtcaatcaagggcttgccattttggcaagagcgcttgattcttccaaacagggatagaggtgaaaaaggcctgccggtatcggcggcctttttttgtttgacatttaattcacttgaagtgaataatatattcgaagtgaattaaaaacaggaggattgatcagtatgccggagccattgcaaacagaaaaaaaccagagccgggccatcactctctttacgatcggtgtgttcatggcggcgctggacaacggaattatttccgctgctctgacgacgattaacagctcttttgatgtttctccttcatggggatcgtggggagtgaccctttacacattgggactcagtgtcagtgtgccgattgtcggcaagctgtcggaccgatacgggcggaaaaagctgtttatgattgaagtcgggctgttcggactcggctctttgcttgtcgcactcagtcagagcttcccgatgtttttggcggcacggctcattcaggcgcttggcggcggcggaatttttattatcgggagttcgcatgtgctggccgtgcttccgaaggagaaacaagggaaagctctcgggcttttaggggcgatgaacggtatggcggccgtcctcggaccgaatatcgggagctttttgcttgatgtaaccggatcgtggcattggctgttcttgattaatctgccgattgccgccgcattggttgtgtgcggcggtttgtttatcgctgaaacgaaagagcctgaggcgaaacggcttgacctcgccggcacaatgctgctgtctcttgcgatcttatcttgcatgatcggtatcacgaatctcgatggggcgaagctatcagaaagcataatgaacgtaaaggtgtacggttatcttttgggagctgcacttctctttctggtgctgcttaaggtcgaaaagcgggttgaaaaccgagggggcgatccgattctcgcctactcgctgctgcaaaataaagtgtttcaatggacgctcgtcatcggatttttatcgggagggctgctcgctgcggtcatttttattccttcttatgcggagcaatatttgcacgtatcggcggagaaagcgggttattggatgacgccgctcgcgttggcgtcaggaatcggagcgtggctcggcggggcgatcacggataaaaaagggccggtcttctccgcggttgtatcaggcgccatcgcatttgcaggcttcatcctgtttccgttatgggtgacggataaatgggaatttgtcacagcgagtgtcattgcggggatcggtttcggatttctgctcggggctccgctgaatgtgcttgtatcagaaacggcgggccaaaacaaaggaacagcgctcggcacgctgtcactcgtaaggcaggtcgggctgacgctcgctccggctttatatgccggcttcattacagcgggctttgaccggatcggagatgacatcaaaaaccgtttagcgaaaagcggcattcccgctgatcaggcgcaaacgccggatatcggcggcggactttcttcgttgcaggagcaggtaagccgaatccccgttcccgctgtcaaaaaagcggtttctgatgcgattgaagcgggcattgccagcggctaccaccatctttatacggcagccgccgtcatttcattatgcacgattgtatctgcggctgttttggcgtttttccgaaagccggcatcctctaagacagatgccagcccatcctccgggaaagctcagtaatatgagcgatgtgatgttcagagtgccagacatatagttcgagcgcttgttccagcgtaaccgtctctttagatacaggatggaagtatgtccgtttgaattgggcttccgtcatggagcgcaaaagagcggcccatcttctgtgcaggatcgctaacagctcaagcgcatccccgcaagcggcggttttggaatcatgaagatcggcccagcctttttcatcataaggacggatttccggttcattctccgttaagctcaatttaaaccgggtatagccgttcatgtggctgtccgccagatggtgaaccacttggcggacagtccatcccccttcgcggtacggcgtatcaagctgactgtccgacatcgctctgacagcttgtttcagtttggccggagcgtgttcgagcgcattgatccattcttgtttctgtccggccgaaatcgattcagccggctgatattctccaatcggatagctgagagtttgtttttccatttttgtctctctcccgttgctcgtattatgaaagtataatggtgatgtcacagccttccgctttcgcttcacgaaagacctgaagcacactctcggcgccattttctgtaagctgcttgctttgttcaaactgtctccattctaaaacgagggggtattccacccagccggtcagacaatcccataaagcgtcaaggttttcaccgtagtattcaggaagggcaagttcctttttcaatgtctggtgcaggtcgctcatacttctgatttgctccccgttaataactgctttattcatgcgcggctcctttcccatgtttttattctatcagtttaccattttcctcttcagaagtgaccggagtctgccgcggttccagctggacaatgccttgcccgccgtcaacggccaccctgtcccccgttttcagttttgacgttgcatttccgcacccgacaacggcaggaatccccagttcccgggcaacgattgccgcgtgggacaaaggggcgccgacgtctgttatgatagcggccgctcttggaaaaagcggggtccagcctacattggttgtcgacgtcactaaaatttcccccgccgcaaaagaatccccgtcttccggagcatcaagaacacggacaatgccctccactctcccggccgctcccgcgaaaccttttaaagtgtgcgcatcatcagcttccgcaggcataaaagcatcgtaataatccgctcttctgtcaggattttcagcccatttaaacggattgaatcttccgttaataacggatgggaacggcggcagttttttataggtttcatagttttgctttctcgcttgaatcgacgcaaccgccggctctttccccgcgagcagatcggttatttcatgcagatacaggaagaaaatatcgtccttcatgccggtcatttccgccgctctgagcgcgaatgctctggctgtccggtacaccctgacaaattctgatctggttgtttctctcatattcgcgtattctgacgctttttccattttggctttgagccatttgaccttatgaggaaacttttcttcaaatcttcggaaggcctgttcatgcgcccgctgctgtttcaaaagcagttgttcggcatcaatacccgactccttgtgttctttgatctgcttcgtcagccaatcccggttttctcccggatgcggtatggaaagttcgtattcatgcggacctcggtggccttggttcctgagatattcttcctcgctcatacggccttttatgacttgatcaatgccgataatcggctccaggctggccagtccgccttttcccctcagattggacagcaggagattcgcatcttctatccctgcgagttttgttaattgagaggttaacgacgaagaggattgcgcagaatcacgcccgccggatattagcgcaaaccacgcgttgcataaatacggatagatctcatcattccatatcgctaataatgcccgctccgtttcggcacgtttcagcttttcctcaatattccggcaccactccggcgattcgtccaagtaggaggacatgttttttttcgcgagcttcattttcgacagatacggtttcagttttttcgagatgatcttcaaaagttcatactttgagaacggatataaaggaatcttcatttccgccgggatttctcccaatgtatcgctcatcatttttcctatttttccgcctttcggattcagaccgaaagcggcgagaacggaaagaggctggctcatattgttataggctctgccgcaaatattgccggaccagacataatagcccggaatgatgcccgactcttcatccagattccggaggagcgaccatgtcagcggcgtcatcacatcgggaatcgcttctcctatatttgtgtttgtccataaaaaatcaccgctgaaagaatcattccattcataggtttccagatttccggcctgtaaggtcgtaatcgggcgggattgtagaatatacaatgtcccgcccgcggcggcccattcaatatcctgcggccctccaagatctttttccagctttttcgccagtttatagagctttgacgcatatttgcgaaattccccggggccgtcatattttttcttaggccgtgccagtttaaaagaataggcatcggcttccccggaaacgagctgctccccgagaccgtagacgtaattgcctgtcatctcccgcctgctccccgtaatcggatctgcggtaaacagcactccggatatctcagacggtatcatcagctggatgacgattgcgatttcatgctcatcttccattccctgaacggcgctatacgcttttaccctttctgactgtgccgatcggcggacttcatcaatcgccctggacatgtcttgatctgttttgacattcaacaccgtatcgaattctccggcgaaggaagcctgagcggaatcctcgctcagcgcggatgatcgtacggcaaacaacgcagatgcatggcggctgcggatggatttcacatattgatcaatagcctctctcgcctgatggcgcagctgtccgtcctgaaaggcagacggcaaaatcacaaacccttcaggcacaggatacccgctttgatacattttagagagaatgcttccttttcctcccgcaaaggaataaagttcgtccggaagttctccgaatgttttgacacagtcattcataatgtccccgctcctttttagtcgttcatccaagctcacagtttttctctttttcactttttttgaaagtatttcctataagtatacaatatatcggtcttcacaagggagaaaatcgatggcgttatgttgtcataaatgcatccgtcaaaacggccgcagcggggtcttcagccttacagtgaaagcgctattaaaattagagataggcggcccgatactgcttgcctggcattcgcttccggcttgccgcggagggtttcgtttgcaggttatgtacaacttccgtatcaaaaaaggcggctgaaaacgccgcctttttttcagactgtgcggccttgatgcgccgccgtatttcttttggtccgcttcggctgatacactttcccgacaaacaggtatccgtatctgaaatggttgcacacccaagatacgaaaatgggaccgagcgtgcagatcaaaaataaaagaaggatggcagccgctaaaggcattgatcgcaaatagccttccagaagatatccgctgattaaaaagtaggagtgcagcagatagattgaaaacgaatagttgctgatcattatcacaatcgcgggcacttttttgagctttgaaaacagatgaaaacacagaaagatcatactgaccgcgtaaatcataatatccggacgcttagaggaaatggagccgccgctgatatatgaaacggccacaatcaatattgccgatacggccgcactgaagtaaaccgcataacggtactgattgatgagcgataaaaaacgcggatattcctttccgcaataaaatgccagacagaaataaaacacccagcccggaaacggaacccaaaagaacggaaaaatagaatcaagccccgatgataccggcggatgaaagatggaaaagtaagccagatagacggcgttgatgataaacgaaacagacagcacccacatgggagatttgttgttcagccagcggtgcagcagcatatggagaatgtaaaattgaaagatcacaagaatgaagtagccgatgaagtttcctaaaaacacattctctaaaaatttaccgatcactgaaacgaatccggctccttcttccgccacgcttttcattaaaatggcatccaccgcggcaataaacagaaacggcacgaaaatgactttgccccttttctttaaaaaacccgcgggaacgcctcccgggtatgacctggcaagcagaaattccgaaataaagataaacgccggcgtgctgaacatcaacagggtccgaaaagcatcaaccgtatgggcggcactggctaaggactcttcctgaatcatcagcaccattgaaactgcgtgaagcagaaccacacttaaacaggacaggcagcgaatcacgaaaatttcttttatctgcatgcggccgctcctttttcacaagcgcgccggactttagcgtatgcttggcgcagccatttttcccgcagctcgggtgtgctcgttttgacgacagaaaaaaggttccgctcggctttttgaatgccgcaaaattgcagaatgccttttttcagcgtaatccagtccgagtttttccggaaccactttaagtaccagcccggggaatccgccgtataaaagacctgtgccgtctctgcccggagcagtccttttacgcggcctttttcatatgtgtaggcttctccagcgacaagcactctgtcaaaaaagcctttcataatcgccggaacgcctccccaccacagcgggtagatgaaaatgagatgatccgcttctttcatcagtttccggtatttcttcgtttcagcgtcccggttcatgtcagagcgctttttttcgccgccgtacttcagcacgggatcaaattggtcggcgtataagtcaatgaccgtatagctttggccgctgtcctttaaagccatgacgacgtattttacgagagccgcattgaaactgttctcatccgggtttgcatacacaatcaccgtcttcatatgtccctcccattatttcttaatttttacaatgattatatcatgatgtcatatgaatgaggcaaagacatgagaaaggctttttccagttctgctgccgtttcgataacccctttctgcatatttttgctgattttgccgccgcggattcaatgacaagcatccggcacttctgcgtttttgagcggccgtatggtatactagctgtcaaatgaatggcttggaggacaacatgagaattttaaagtacgcgattttagggcttttgcgaaaaggcgaattgagcggatatgatatatcgagctattttaaggaagagctcggccagttttggagcgcaaagcacagccagatttatccggaattaaaaaaactgacggctgagggatttattacgtttcgcactgcgattcaaggaacaaagcttgagaaaaaaatgtacacgctgactgacaagggagagctggagcttgctgcctggctgacgaaaaaagacccgattcctgaaacggtgaaggatgaatttatgctgaaggcttatttcatctcagctttgacgcaggaagaagcggatgagctattcaccgatcagctcgtaaagcggaaggagaaattgtccgatctggaaaacagttatcaagaactgatgacatcgtccgcggaggcggattcattttcttctcctgatttcggccattatctcgtgctgacaaaagcgcttgagcgggaacggaattatatttcctggcttgaagatattttggctctcatcaaaaaagcataaacaaaacggggcggctctgtatctgcaagccgcctgtttacgttctgagaaccgcattgataaacgaatcagccattaaaataagaaaaagcagactgaaatacacaatcgaataaaaaaacatccccttcgaccattgcgtgtcatccgccgcctgaaagcctttgacgctccggtacagccagatggctccgagcaggagagcggacgcggtataaaacaggctgacgtctatataaaaaggaacgagcagcgaaaccgcagtcagaacggcaatatagcgcagcatttttatttttgtggcgcggttgccttttatgatcggcaaaagcggaatgccggcggcacgatactcttcctttcgcctgattccgatcgcccagaaatgcggcggctgccacaaaaacataatcgcgtataacaaaatcgcgggcatatcaatgtacccggtgagcgcgcaataaccgattaaaggcggagccgccccgggaaagctgccgacaaatgtgctccagacggattgtcttttaaaccaaagcgtataaacgacggcatacagcaaaaaggcaagcaggccaagaacggcggtcagtacattaagcgaaacaagcatgatgaatccgcatgcgccgagacatgtgccgtacaggatcatgaccggcggcggtattctccccgtgacgctggcgcgggtgcgggttcgcgccatctttgcgtccatgccgcggtcaaaaaagttattaaaaacagtgcttgatgccatgactaacgccgttccgatcatggcaaccgccatggcggcaaatataccgggccctccgcccgtcctttctgactgaatccatgcgatccaaaatccgcccaatgcggcgagtgaatttgagatgataatccccggtttggcaagaatgataaagtccttgaccgtcatccggtttccgttatgcttcagcggctgttccgtctgtgctgcatttgagttcatttgttcaggttctcctttttcggcttatcatatcaggaagaatcaggaagcgcaatttattttgggcatttttcacacaattgtaaattgtgtatgaaaagccgcatcttgtgaccggatgcggcttttgcctttttctattcaaatcctgtccatacagctttttcaatccagcggatgctctgagctcgggccggcgatggcggctccacgcgtcatttttgcgactgagatgttcgctctcttcagtcactcaaaagccgtgtggatattccaaatcgacgttcttctttcccgagccttttcaagaaaacttcagaaaaatagaaaaccttgccgattagacggcaaggtttgtttcttacagtgtaaatgcgatatccgcccctgatacagggtctttgacgaatacgccctcttctttttcttcgatctcaaagccggcatcggtcagcgcttttgtcacacgtgacagctctttttgatgcggcagcgcgatggtgtaataatccagcccgcttgcatttcccggtttcggcggcgcatgttttccggcccatatattcagaccgatgtgatggtgataccctcccgctgaaacaaacagagcggacatggcggcgtaattgccgacaatgtcaaaaccgaggatatcggtgtaaaacgctttggcttcctgtaagtccgtcacatgaagatggatgtggccgataacagttccttctggaagacggcttttccgttcagctccggcttcttccaaaagcccgtccacatcgacgggcgccgtttgcatgacataattgccctctgcatcccggcgccacgtgctgcggggacgatcggcgtatatttcaataccgttgccgtccggatcagacaggtaaagagcctcactgaccgcgtgatccccctgaccgagcgcgatgccgttttcaatcagcctggccaatgcgatgccgagttctttccggtcaggcagaagtatcgcgaaatggtaaaggccggtgacagaccgctccggcagaacgacggcgcttggattttcttcaagcaccagcaggacgcgttttccgtctgctgacagtcttgctgaacgatctgtctgcgagatgacttgaaggccgattacattccggtaaaagccgagcgagcgttccatatttttaatggtcaatttgacataaccgattgccgtatcttgatgaatgccggtcatttgaacgccttctttcttatgctgaaaaagtttctcccttttttgatttgaaaaggagctgatccaatgaaagcagacggcttcctgaaagcgctaagtgaattgacgcaaccagtaagatgaaatcaaattccgatccgcccataaatggtgaggaaagcttcgccgtgaagatggcgccgactaatgtgacggcaaacagaacgccgataatgcgcgttgccaaaccgaaaaagatcagaaccccgccgacaagctcaatcgtcgcgatgacatagaccataaaggccggaatcccgatgctctggaaaaattgcgtagttccttccaacccttgaaacttggataaaccgtgaacaaaaaagataatacctgttacaacccttaaaagcagtgttcctgtttcgaatgatttattcataaaatcctccttgaaaattattatcacttactttatgtaagctagtatatatacataacttatttacgtcaagtaattttgttacatttaacgaaaataacttaaaagtactatttgccttcgcgaaaaaaagacctccgcactctgtcggaggtctttttccctatctataattcccggaactggctttcatataattcccggtaaaacccgttctggctgagaagttcggcatgggttcctttttcagccatttcgccgtctttcagcacaagaatctgatccgctttttgaatcgtgttcagcctgtgagcgatgatgacgcttgttctgcccgccattaaacggccgagcgcttcttgtattttcacttcggtcactgtgtcaatgttgctcgtcgcttcatccaaaatgagcagcaccgggtctgccagcacagctctcgcgatggaaatgagctgtttttgtccttggctgatgcccgcgccgttttgggtaagaacagtatcatagcctttcgggagccgttcgatgaacccgtgggcattggcggcttttgcggcttcctccacctctttgtcagaagcatccagacggccgtagcgaatattttccctgatggtgccctgaaagagaaaggaatcctgcaggacaaaccccatgttttttctcagactggatctcgtcagttttttgatgtccgttccgtcaatgaggatttttccattattcggctcgtaaaaacgggcgatcaggctcgtaatggttgttttacccgctccggtcggtccgacgaaggcgatggactgtcctttcggaacgctgaaggacaggtgttttaagatcgggctgtcttcctgatagccgaaggagacatctcggaattcaatctctcccgttttgatcggctggtacagcgcatgctcttcatcttcccgctcctctttttcatccagcacgtcaaacacccgttcagccccggcgatggccgataacatcgtattgaactgattggctaaatcatttaaagggcgcgtgaactgccgcgaatattcggcgaatacgacgatggaaccgattgaaatccaccccttcagcgcaaacagcccgccgaccgccgctataatcgtaaagcttaaattgtttaaagagttcatgactttcggaatgaatcccgaaatcgtctgcgcccaaaaccccgatgattgtaacgccgcgtttttttctaaaaattgttccatgacgcggtcttccctcgaataggctttaatgaccttcgcccctgatatcgactcttcaataaaaccgttcagctcgccgaggtttttctgctgctgtttaaacagcaatcccgtccggttggtgatccatttaatgctcaaaagcatgatcggaataatcaaaagcgtgatcaatgttaaaagcggactcatgtacagcatgacggcgattgtgccgacgaatgtaatgacgctcgacagcacttgaatgacggatgaatttaaagtggagctgacattttcgatatcattggtgacccggctcattaagtccccgagccgctgtttatcaaaaaacggaatcggcagctcatgcagatgggtaaacagctcgctccgcattttaaacacggtgctttgcgagatattgatcatccaatagttttgaaaccataaggacaatgattgcacgaggtaaatcccaaacaggatgaacagcacccccgccaatccgtctgtcgtctggccgacgataaaatgatcaatcgctttcccgatgacgaacggtccgagcaggccgaatatggcgcttatgactaccatgatgatcacaagggttaaaagcccttttttctcggctacataagaccagattctgcgcagcgtgccttttgtatcttttgctttcgcgcgttttctgccgccttcatttgatttgagcggtattttcggatatcggaaaggtttacgaatgtctttttgcattgtcagctccctcctttccgaattgtgattcataaatctgccggtacaaatgagactgtgccatcagctctttgtgcgtgcctttggccagcagttcgccgtcttcaagcaataatatggtgtcagccttcatcgcagtcgttattttctgcgtaataatcagtgtcgtgcattcataggatctgatcgcttgtaaaagcttcgcttccgtttgaagatcaagcgcgctcgtactgtcatctaacagcaggagggacggctttctgataaaagcgcgcgcgatggaaatccgctgcttctgcccgcctgacaaattgacgccccgctgtcccagcaccgtgtcgtatccgtttgacagcttcataatcgtgtcatggatttgcgcgtctttggccgcctccattacttcatctagtgaagcatcctcccgcccccaggcgatattttcacggatggtgcccgaaaacagaagcacttcctgcggaacatagccgatttccctgcgcagcccgcaagcggagaattcaccgatcggtttgccgtctatgaaaatactgcccgaatcagccgtgtacaggcgcggaatcagctgaaaaagcgttgattttcctgaacctgtcgcgcccataatggcaaccgtttctttcgggctggcagaaaaggacacgtgatgcagcgcgtctttttccatgcccggatagcggaaggacacttcgcgaaactcaatcccgcctgcaagcgcccgtgccgggtcctgccccgttccctcgccgccttctgtttccagcacctcgccgattctttctccggaagccttcgcccgggaaaataccatgataagaaaaggaaggacggacagcgcgcctgtaatccgcgtcgcatagttaatgacggaaacgacatcgccgacctgcgctccgccctgagcaatgcttttggcgccgaaccataagataaacaaaatgcaaatgttcatcagcagcattaaaatcggcatcgccgcttccacgagacgaaaagcggagaccgttttttccatcagcttcgtattcgatttcaaaaaacgtttcacttcgtggtttgcacggaggagcgctttaatcagtttgatcgccgtcaggttttcctgcatgatcgtgttgacctgatcaagccgcttttgcacagaccgaaacagcgcgccgcctcttttcagcacccacagcaaaaacaaaagcaaaatcggcaccgtgatcagcagaaaaaacccgagtttcgcattgacggtcagcgagagaataatgccccccgcaatcattaacggcgcccggagcataaaccggagactcatgaaaagcatattctgaacctgtgtcacatcgtttgtcagccgggtgataaacgatgtggatgagaattgcgcaaatgtcgaataggagaaggattgaattttttgaaaaagcccttttcgcgtatcatacgcatagctctggctgatgtgggcggagtagaatgaatttaaaatgcccgatgcgaatgaaacagcggtcagtccgatcatcacgccgccccacagccaaaccgttccgagatcctgctttaaaattccttcgtcaatgattttcccgatcagcaggggctgtatcagctctaccgcaagctcgatgagcatgaaaaacagagcgattcccgccaaaagagaatacggttttacatatgataaagcctttgacatgtgtaagcctccaaatcctttgttcaatatgtatgtatatttattttatttgtttgtcttaaatgaataaaggattaacccttgaactcccacttttattatgtattttgtgtaaaaaaagcggaaatcattgaggataaaaattgagggaatgaagcgtgcagatatatggaggctgtcttatcttttctttttaccagctcctgaaccggagccttttattttaaaatgactagcggagcctttaacagacgtccgctagtcagatgatcattcataccgtgtcatttcatctaacgaataaaaacgagagcgaccccgaatcctttatcagcatcaaactcattgatcactttcatgacctgccagcgctggtttggagcatcagattttgttgcaatcccgttatgagcgtgaataaaatctcccggtttcacagtctcatcgcatctgacatatacctggccgatgagtccgacaatgttccactcgtctctctcttctcttgaagcgtagtcttcttcaggccgaaagtccggattttcctttggcgccatgaccgtatggccgttcgcatctttctgttcttcataaacatagccgccaaattcattctttacgtatcgtcccgaccagtgaaaactcgactcgccaagaatcactccggcggtctcggaaatgaccccaagcatgaggtcacctttttcagccggtctgatcttatcaccttcaagtgtgacaagtgttcccgtcggaatcttttcccctctcaggctttcaaaatactcggcgtagtcagagaatgtcgaggaacctgttacgcctcccgtagccttaattgttccttcttttgcgtgaagctcaatctttctgttggctgatgacggagtgctgccggcaccccagccccatacagttgagttcgcatttgggttaatcgtattgtatgaaccgattactccagattgagaacctcctgcagcctgtccccggacagaaccgacgacaaagccattagttcctgtaacatgggaatctttagatgccataacagaagatcctttatgtttaaacaactcatacggtgtttttttaccgcctacatgaaatgttgtttcatatccttgaaaatcaatatttgatatattcagatccggacccgaagaatagagtccgaccgttccgctgccggctcccaatctatgcccgtatacattgctcactgtacaattatcaacgcctccgccaaaagcaagccccgtcgtgccgccgtcaactagaaaaacgccgtcaatcatgcacttacctaccgcattttctccgccaagaacatacagatcatgagcagcggagcggaacccgcggatcgtaatattcttcagattgacataccgccctttgtaataaatcataatgatcgtgtcattgctgtaatcgtatgaacgatcttcacaaatagcttggaaattcactatattaactgaatcatagcccgaaacaaccaacgcactcgctccgacgcctttatatatagaattttgtttaggatttgttgcctgacaatttactaattggacatcatgggcagtttttgatgtcggctcagccgataaatgatggccaatatgtctaatgcaaaaaccgatcgcattttcgtaagcacggcaattagccagttgaactcgtttagccgccggtgcatagtcatgcgccttaatttcaaaaccgcgtgcaccgccaattgcaacacagctatctacaaatacatcttgagaaccgtcatcgatctcaaagcaatttgaatttgacgtgccattcccatttcccatcgggtgataggaaacacagtggctgaaagtagtgtggaatccaaaatgacaagtaaagttatcatccccggaccctgttgcttcacaatgtgaaaacgttacaaagttacagccgttgggctgataataagttggatcatctttttctccatgtctgttatagttagggcttgtagaatcaaagccgtgcaggccggcgttcttcgcaaacacatgctcgacaaaagaatagtcaacattcgcaaaaagcaaacagcttgaagtggggcctttcggaatcttccagccggcaggacgcgtatccttgttccaatccaaagtgagatggccgacataaatattttcattaccgttcgtataatcactgttggtcagaacagaatggccgaccggtgtttcgtctaataatttaatgaccgttcttttcttgcctgctccgacaagcattgtatttgaaggaacaaacaatcccgatgttctgaatacacccgcgggaactgttacgacataacctccgtcggccatggcatcatgaaatgcctgcgtatcatccgttacgccgtcacctttagctccaaaatccataacgttccgctctgtcacatgttcaaatctgttttcatacattttaagtctttcgtttaaattttcataagttgacgtgccattgctaagcgcagcaccgattttgctgtcaatcgcttcaaagttttgagcaatgctttcaacctcaatcccctccgttttatcgggtttgtaaagtcctaagaaagtcgtatagtttgtcattgccttgcctcctatttgttaattgttatataaaaataccgcagaagtcatttcgttttttgcaccccctcattttcactcctgcatgtacaggtggcaaaggtatgacaaattcatacattttttcaaaacataaaaagagcgccggattaacaagcgctctgcacatagtctgctgctgcagtattttaaccgttcaatattttctcgacacgctcccgcatttgcggaacgcctaatccgacaatgacctgaagcgccctgccttttctgacgacgccgtgggctcccagctctctgaaatcggcgtcacttttgacctttgattcatcagcgacagtgacgcggagacgggtggcgcagttggtgacctccgtaatattgtcctttccgcccagcgcttcaatatacaaagcggctgtatcccgctgtgtttcgtctgccgccgctgtttcttttgaagcctgcttccgttctctgtactcctttttcgaatagagctttgtttcctgcccctcctctttttctctgcccggtgtggcgatgttgaatttgagaatgaggaaacggaagacgaaaaagtaaacagcggtaaaacacaacccgatgatgatctggtatacatacgtcaagccgtggcttgacgccagcgggatccagttcaaggtcgcagcttcgatcaaaccgcctcccatatttccgacgacgccggccatatacatgacggttgccatggaagcggcaagcaaagcatgaaccgcaaataaaaacggcgagataaaaaggaatgtaaattcaatcggctctgtaattcccgcgacaatggacgtcaaggtgaccgggatcaataggccggcgacgatttttttcttttcctttgaagccgtggcgtaaaaagcgagcgcgattcccggaatgccgaagattttcgagttgccgtgaagcgcgaagcccccctgcgggaacaattctttcagcggtttgacgctttgagagtattccccgagatgctgggcccaataggtgacgataccgccttcagccacagccggaccgtaaataaacggcgagtaaataaaatgatgcaggccggtcggaattaaaatccgctccaggaacgtgtaaatccacacgccgatcgccccggaagaaacgagaaagctttgcagcgagcctattccggactgaaccatcggccatacgtatgccaccgcaagtgaaatcggtatcataatgaagaaagaaatgataacgatgtatgaagatccttgaaaaatccccagaaaatccggcagttttttatcaaaataacgattgtgcaaatacacgacaatagatgaaataaagatggcgccgataatattcgtatcaagcgttttgatcccggcgatcatcgtcagcccgctcgttccgcccgcttcctgagtcatatcgacatgaaaagccccgccccaaaccgtcagaatcgcattgataaagtaattgaatgtcagataaactgtaagcgcttccaaacaggcccgcgcctgcgcttttttcgctaaggcgacaggtatgccgatcgcaaacaggagcggcatttgattaaagacggtccagccgccctgttcaatgacgtaccagcattgataccaaagcccgtcaggatcagccagcggccccatcagcgttttatttttaaacagcgtactcagaccgacaataataccggaaaatgcaaataataaaacaggcacaaacatcgcgctgccgaagcgctggactttttgcatcatttcacgtgacctcccgctatttatcaaaattttcaagctctttataatcaacatatgcacggaataacgcttcgcccaccagaaaaaacggggcgaatgcgacgatttccgttttatcgcttaacgtcaccggcttgctggtcgcataaagattatacggcgtcgtttgcgccagtacgttgtttttcagattggtgattgaaataaacggaactccctttgcggacagggtccttgcctgcggaattaattcgggtgtttcgcctgataaagaaataatgatgaatacgtcatcaaccttaaaatcatcacacatgatatcaaactctgtgatgtcctgaattaaaatcaaatacttccgccgggatacaaacatccgttgcagctcacgggcgcacaccctctgagccgtccccgatccgtaaacgaaaatccgttttgcttcatctatcagccggcacatctccgtcatatcttttgacttcacgtattttacattggcttcaatatcatccagcagcttttcaaacgtcatattctcgccctcttcaggctgatcctcccatttcagaaaaacccggaattcactgtagccgctgaagcccagtttttgggcgagccgcaggatggaagaccgagagacattgcaggctttcgccatgtcattgataccgagatggtagcacgtatgcttatgattcaatatatattttaaaatataaaaatcgttatcatttaatttcgcgtaatgctggttaaccagttcttcaagactcatcccaaaaatccccccgttttctttctattatatagaataacagataaagaaaacggggaagattgtcatcaggaaataggagacggacttacatcaagctcaggccagtagtccttgttagcctccatcagatcttcaagaatcagtcttgccacacgggcgttcggcactgtttttgacaggattagcgcctgccacagcttttgaaatgaccgctcttcccacgcttcagccgtcagtttttcgacagacacctgctgttccatcaggcctttttgaaattgcggtatgttcccgactgagagcggttccggtccgtttgagcctacgagacaaggaatctcaaccatggctgacggatcaaagtttgcgatcgcgccgttattttcaacgattaacagcatcctctctcctgtgttgtaagcgatggcccgggcaaggtcgacgatataggaagcatgatcatcaattttaatttcactgttctccgacgattgttcgcgcgtaatcatatcgcattggctgaaaatgaaagcttcccgcccttccatgacttcgttggctctcgtatggttcggatttgattttttcaccatatcatccgggaataagtaatattgcagatatgtgttcggaagcgtatccggatcagccgcctgtacgtcgcgcgcttttttgaatgtgtcattccagcttgcttcagtctgttcggcctccgtcttcggaacgtagccgtattcacggacatgctctttcagcttcggcattaaatcattgccatgccggtctgtgatggacgtccaccagccaaagtggttcaagccgtagtaacggacgttcatttcttttcgtgaagataatccgaggatgttcgccatacgatcctcaattccgaccggcatgtcgcagatgttcaatattttcgaattcggtctgaggcgccgtgtagcttcggccacaatcgccgccggattggagtaattcagcatccatgcgtcgggcgagtacgtttccatataatcaagaatctccagaacaccgccgatagagcgcatgccgtatgcgattccgcccggcccgcatgtttcctggccgaccacgccgtacttcagcgggatttgttcatcgagcgcgcgcatcgcatattttccgacgcggatatgcgccatgacgaagtcaacatccgtaaaagccgtctctgggtcatcagtcgccagaaattcaatgtccggcgctttttcttttataaatacctcacacgcacccgcaatccgctcctgcctttctttatcattgtcataaagtttcagctttctgatcggaaactcttccaggtgattcaaaagcattaatacaattccgggggtaaatgtgctgccgccgcctgcaataacgattgagaatgatttgtctgtcatgtgaagccctcctctgataacgtttacattttatttatatcatgagaaggtccgatctgtaccgggtttggaggagttagatcatttaatcatttttagttatttttctcaaaaagcgggaaagttcccacaggtacgaaagaggcctgctgtcatcagcagacccattctcaaaaatgctcttgtaaatcagaaagcagcacttcctgctcaaattgcggatttccgatcggaaaaattctggctgtttccttgtcttcgttgacatgctgaatataaatcgggactccttcatatgtcacatacgccatggcggcggattccgaaatgtctttcgcacgctgtgtattcacgtttcaaacctcctttaggcctcacacataacgtgtccggcagccaagagaagtatgcttgtttcttacaattgtccggcggtgagtttgaattttttgaggcgtttgtaaaacgtgctccgcgggattccggccattttggcggccagcgtaacattccccttcgctgattcaagcgcgtttacgatgatgtttttctgaatgtgctcccggatggaggcgggggacgcttcttcctgttcataagactcggccgcctctttaagacctgacgcttcaagcagggctgcgatggggcgccctgacagccgcccgtccgggaacatgacggaaagacgttcaaatacattaaacaattccctgatattccccggccatttccggctctttaataggtctaaaaagtcatcaggaagctccccccgccagccgcgatttcgctgaaattcaaggaagagtccgggaatgtcttcggtgcgttctcttaatggagggagatggatcggacagacgtgaagccggtaaaataaatcttctctcagctttttgcattcgacaagctgtctcagatcagtgtgggtggcagtgatgattctgatgtcgacgggaatctcttttgtcccgccgaccggggtgactttccgttcctgcagcacccgtaacagagcgacctgcatggagtgtgatatttctccgatttcatcgaggaaaagcgtgcctttatcggctttttgcaaagcgccgttatgtcctttccgtttggccccggtgaaggcgccttccgagtagccgaacagttcgctctcaatcagcttttcggggaccgctccgcaattgacggcgataaacgggccgtttttcctggagctgttgttatgaatcgcccgggcggcaacctcctttcccgtcccggtttctcccgtaagacagacggttgcgtccgttcgggcgacaagctccagctgctgaagcatatgtcgggatgacgggcttttgcctgccgcaccatggaatataaaagacggcttttcttctcgtttggataagtaaatgcacgagaagccgttctcctcccgcttcgcctgcttgatgtgaaagccctgttcctcaagctcgcgcagcgtatgtccggtaaaatgctgaacgggacggcttgcggcgataacccggctcatttcattgcaaagcacgatcggatcgtgagaccgggtaagcccggcgaatttgctgatcatgtcaagttctgtcattttgatctttagggcaagctcccgttccgccgtataagcgatggaggaggcaattccgagcataaaaggctgagcgcgggcggcggggcaggaaatatcaatgacacccgccagccgtccgtcttcataacggatcggcgcggcggaacagctccattgatgagaagcgagcgaataatgttcagagccgtgtatcatgaccggctcatttgtataaagagccgtcccgatcgcattcgtgccgacggctgtttccgtccagcgggcgccttttaagaaattgatgcggttcgcttcatgaatggtgcgcgggtggccgtcaactgaatggacaacgccgtctgaatcaatcaggagaaccatcatttccatttcccgcattgccgttttcattctttctgcatgaggcattgaggctgctaaaaataatgaatgcttctcggcctgcctttctaaatgatctgccggcattacattcggccccttttcgagataagggttgacgtcggcttttttgcagcggtgccatgaggccgccacccgcttctgaatacgggattcatcaagcacgccttctttcacaaagcgcttccaggttttaaaatcattccgaatgacattcattgtattcgctcccccctgttcagaccatcttttcatatattgtaggggaaaaataaagcgctttcaacgaaaaataccccttctcatctgagaaagggtattccggttatacggaatgcaccgcaagtccggtgacattcagcagagcttcctgaagcgtttctgacagagtcggatgcgccgcgataaagtgctccgacatatccgccgtcatttcaccgttcatcatcatgaccgcctgaccgatcaattccgtcacgtccggcccgatcattgacacgccgacgatttctccgaattccggttcggcaatgattttcattttgccgccatgctgatgtttaattaacgcttttccgttagcagaaaatgaacattctccgattttcacatctccgtatgtttctctcgcctgtgtttccgtcagcccgacagcggccatttccggcgatgtataaatacagcggggcaccgcccgcatatcgactttgctgtcctttcccgtggcatgcgcggcggctgtgattccttcatgaatggcggcatgcgcgagctgcattcctccggccgcatcgccgcacgcgtatatatgaggcacattggtctgcatatggtcattgacttcaatgccgcgcggagaataccggatgccggcctgctccatattaagctcttgcaaacgcggttttctcccgattgcaaccaaaacgtgatcagcctgagcctcaatttctttgccgtcttttgtccacacggcggttttcctttctttgtcaatccgctgaagggcggctttcgtctgaatatcagccccgctgtctcttaaagagtcttcgaaaacagcggcgatttctccgtcttctgccgggagcagccggtcagccgattcaatcaccgtcactttcgttttaaaccggctgaataaagaggcaaattcacagccgatcacacctcccccgacaataagcagagaagaaggaatttgctgtaaagaaagcgcgtctttgctgtcgatcacccaatcgccgtcaaatggggcaaacggcagctccgccggttcagatccggatgcaatcaatatccgatccgcttccagaatgtcttttgcgcctccttctccttcaactagcaatgtctgctctgtgagaaatgaagctgtcccgctgatgactttaatctgatttgctttcattaagtattgaattccctgcacgagccggctgacgatttgccgtttgcgcccctgcatgcgggcccaattgagtgtaatgttttgcggcagttcgatgccgaatgtatttgcgtgcctgattttatcgagcacattcgcgctttccaaaagcgactttgtcgggatgcacccctcattgagacaagtgcctccgagcggccctttgtcgatcagaacgacttcttctcccctccgcgcggcagtcacggcagctgcatatccggcaggcccgccgccgataatggctagtgtcaatctcttcaccctctctataaaatcaatccggccggctcttcaagcagcgctttgaccgttttcaggaagtccgcagccggtgcgccgtcacatactctgtgatcaaaggtaaggctcagcggcagcatggtgcttttgacaagttcatctcctttaaacgcaggcgtttcatagcttgcgcccactccgagaataccggcttcaggcggattaagaatcggggtgaaatgctcaattccgtaacccccgagatttgtaatagaaaatgtcgatccgtgcagatcatctccggaagcattgccttcccgcgcccggcgtgccgatgtgctgatgtgatccgcaagctcaaggaatgaaagcttttccgcatcccgaatcaccggcacgacgagaccgttttcaagagaaaccgccatcccgaggtggacatatggataggtgatgatccgctcctcttggtaagagctgttcagctcaggatgctgtttcagcgcaagcaccgcggcccgggatacgaaatgtgtgaccgtcagtttaacatcgctccgctttttcgcgctgtcggcgagctgctgctgccattttacaagctccgtaatgtccgctttcatcgtcagcgtcagctgggcgctgttttgcaggcttttgtgcattcggtctgcaatcacttttctcatcgctgaagccggttttccctccggctgtgccgtctgaaccgaagactgcggttcagcttccgtcttcatggccttgatgacgtcagcttttacgattctgcctccgggccccgtcccgttcagcgtatcaactttcaacccggctttctccgccatttttcgggcaacgggagatattttcacgcggtgtttacgcttttgcacggctttgggagcgggaatatgttcaggttcagcttgcggtttccctgcattttcaggagccggcgcctccttctcccgcacttcttcgccgttttccccgatataacagatgggcgttcccggcgggactccttctccctctttgactttaatatgaagaagcgtgccgctttcaggcgcttctatttccatttctattttttccgagttgatgctggcgatgctttctcccttttcaaccgggtcgccgacttttttattccagacggatacttcacctttcttcatcgccattcccagcttcggcattactacttttacagccattctatatccctcctttaattcattgccggctcgccaagcaattcaagcgtgacgctgacaatttggtctggtgtcggtaaatattgatcttcaagcaccggcgaaaacggcaccggtgtatgcggcgctgtaatccgtttaatcggcgcatcaagcaaatcaaagcccttatcggcgacaatcgcagcaatatccgtggcgatgctgcagcgcggattggcttcgtctatgatgatcagccggtttgttttttctaacgatgtgaaaatcgcttcctcatctaaaggagacagactccggggatcaagcacctcggcgtcgatgcctttctcagaaagctgtgcagccgcttcaagcgcggtattgacctgcttgccgaccgcaaacagcgtgatgtcgctgccttcgcgtttgatatccgcttttccgagcgggattgtataataatcttccggcacctcgcccttcatgttgtaggacgttttatcttcaaaaaagaataccggatcattgtcttctattgccgccagcagcaaacctttggcgtcatatggattggacggcacaaccgtcttcagacccgggatgctggtgaacaggccatacagcgcctgcgaatgctgagcggctgcccggaacccggctccgtatgtggtgcggacggtgatcggcacttgcgctttaccgccgaacatatagcggaatttcgccccttggttgatcacctgatcaaagcacgttccgataaaatcgttaaacatcagttccgcaatcggtctcagccccgtggatgccgcagccatggccgcacccatgtagcccgcctcagaaatcggtgtgtccagcaccctgtttctgccgaattcctgtacgagcccctttgtgacccctaatacaccgccccatgcttcatcatcttgcaaatgatcgaccgccgctcctccggcgacatcttcaccgattacaagcacattgtcatcttttctcatcgcaagcttcattgcttcattgatcgcgtccgacatgcttatgactctcgccatctcacattccccctttttcatatgacacgtagacgtctgtcaacagctcagactctttcggatatggactcttttcgctgaacgagacggctttttcaatcgattcgctgacacgctgttcgatgtctgacagtttatttgcatctgtttcttttagaagatagtttttaaagccttgaatggcatccttttcttcaagatgctcagtcttttcatcctttgttttatacgtttgggcatccccttcgaaatgtccgtagtttctgtaagtcatacattcaatcaaagacgggcctccgccgtttcttgctctttctatcgcttccccggctgcctgataaaccgctaaaatatcttttccgtccaccgtgacccccggcatgttgtaggcagccgcccgatcggcgattgaatcacaggctgacgcgtactcaaatgtcgtggcttcgccgtagccgttgttttcggcgatgaacacgacaggaaggttccatactgccgctaagttcagcccttcatggaaagtcccttggttattggctccgtccccaaaaaagcaaacgcttacatttttagtttgtttatatttagccgtgagcgctgatccgcatgcgagcgtgaatccgcccccgacgattccatttgcgcctaacatgcctttatcaagatccgcaatgtgcatagaaccgcctttgcctttacacagtccggtcgcttttccgaatatttccgccatcatgccgtccagatcacagcctttggcgatacaatggccatgtcccctgtgtgtgcttgtaatgctgtcgccatcatctaaatgagcgcacacccccgcagctaccgcttcttcaccggcatacaaatggacgaatccgggaagcactccttgtgcgaaaagttcatgcactttgtcttcaaagcccctgatttccagcatcttttggtacatccacagcgctttctcctcagttaatgacaagccttctcgttttaacaattccattttgtgcgcctccttctatttagggttcacacttataaatgcaagaagcatgccagcctttgaagcccgtaaaatgaatgtttttatttttacaatggagacagtttgagacaggtgtctcattttgtctcgatctgttccctttgtctcgttttatggcatacaaaaaagaccgggcatcaccctgtctttgacaatgatcgacgtatttatttcctcggaaatcttttaactgcttcattcttctgcatacagtctatcgcggcgtttgagtggttacactctttttttcatatccgcgtgctgcagttcatgcttttcttcaacagcccgattcagcgcttgaagcatgtagccaatgcctttatacgatgacaaaggccaggtgatatgctgatgctctccgatgacggcgtttaggacgcttcggtattttttcccgccaagcatgacaagctcctcgatgtcggagaagcctttttcatgaaattgacggcgcagctcgtccgctgccatgatctccggatgaccggttccaaaagtgacatcgtaatttccgggaaccatatcatccggacgaaggaatccgtgcttcgccgacaaaatcacccactcatcgaaaaatgctttcgcatatcgctcgcacgcctgatgaaacgggctgagataagcgtcttccgcccttaccggacctgtatctgaatggacatcccaaatttttttcttgccgcaggggatgatgcatagtcgtttcatttttctctccccctttatgatgtatctcctatcaatgtaccattattcgtttatttctgcatgacgaaactggccatggatctgtctgggtaaaaactgcacacaaaaagacccggaattcaaatcgaaatccgggccggatgaaggttgtttatgtcactcttgctccatcccatcaagatactttctctcaaagtcatcgagcaatgcacgcacttcatctgttgactttgtattcatgcattgatttcttaattcacttgctccccggaatccgcggagatatatcttgaaaaagcgggggagcggtttatatgctcgggcttctgcttttgaatattcatcatgaagatccagatgcaatctcaaaagatcaagcaattccttactgctatgctctctcggctccttttcaaaggcgaatggattagtaaaaatgcctcgtccaatcataatcccgtcaacaccgtattgttcagcgagtttcaagccggtttcacggtcaggaatatccccattgatcgtcaaaagggtatccggcgctatctcatcacgaagtttcttgatttccgggatgagctcccaatgcgcatctactttactcatttccgctcttgtacgcagatgaatggaaagattcgcaatgtcttgtttcagtatgtgtgtcagccagccgcgccattcgtctatgtccgtgtagccaagtctggtcttcacactgaccggcagacctcctgctttcgccgcctgtattaattcggctgcaacttcaggacggcaaatcaggccgcttccctttccattccccgccacattaggtacaggacagcccatattgatatccaggcccttaaaccctaattccgccatcccaatactcatttggcgaaagttttcaggcttatctccccatatgtgggcaaccatcggctgttcatcctccgtgaaagtcaaacggccgcgcacactatccttcccatccgggtgacaatagctttctgagtttgtaaactctgtgaaaaacacatcaggtctgcctgcttcactcacaacatggcgaaaaacgacatccgtcacatcttccattggtgccagtacaaaaaatggccgcggtaattcacgccagaaattatctgtcataacaaatccaaatcctttcatgatgggatacagccaaacctttatcccaaaattaaaaactgaccatgcttcttttacacttatagcatgtgtcagcacttcttatcaaacgatagtaaattttgaacatttcattaacacacataaatggtattaggttgaaacaaatcattcatattacttgcttttgcactaatcaacgtgatcgcctgtcctcttatgtttcattttttaaaatgaaaatctggagagggccgtgcaagaaaaagaccgaagatcgacaatgctcattattactaagaagactctttaatgtatacttatgtctacttaatctattacgcatgctaccttcccccacatatatacaattacgagtttggttttttaaatctgttacataaacacctttcattgatctaaatttttgatcttttagcccattttatatgttcaggcaaaggaatttcaaaattaattgtatgattagcctttcccttaatgaagaattcctatggtaatttgattttcaaatccattatcatctcctccaaaaatccacattataaaaaaattccctatttatctatcaacgcttagcttgcctaacatatatctttaatagtaattacatcttaaaaatagacccaccatttatctctaagtttagctgtaggcataaatttaagcttgcattcaatgagtggagcttaatttttttattctgcaatttttttaatcttttttaatttcatccttctctaaacctaatctttgcaataattctttatcgtattcgataaaatcacctaattgatcattataatatgggtattgaacagttaaatcatttatcgcaaggtttctataattctttttgactcttatatttcccaactctatttgtggaggatttttcaacatattaattagcttttcagatgttatatttccttcaaaatcttcgtgatacggttttaaagatctatttcctattgaaaaacccggaggattcctatctaaaaaccgaacaaaagctgaagtatcagcaatatagcaatcattataatacatactttcaccaagcattgctgtcgttacaataactttataaatatttttaggatgccattcttcttctagtttcaattcttctcttacaatgtttatattctccacgtaataatcaacaatacgatttagttgctcgacagcacttctttctttatggcttttatttatcttttccgtttccctttgtattatctttattaagaaattataatattccctaatagttagtggttgaccaaaggcttttaattctacaaagaacaaatcattgtcaatagtaaaaactacatcacattcatatgtttcaccattaacaattctctttagtcttttcgcgccaatatctagcttgtttagtttatttaatatgtattcttctaatccagtacccttaaaagaaatatccactttcttcttatttaacagagatatcaatgacattgaaggatctatatgtgatgccacagaaggaataataatcaaactgtcattatgaacgacaaaaggacaatctaacaaatcttttgcatcttgattaaatttgaagttattgatgattttaagagcactggcttgagatactccctttgaaacaaataagtttatccagtaagtttcagttttcataatagtccaattatttaagtttaatggtttaactacttttgactcgaatctttcctttaaataattttcagcctcaatttgaattacaacgtaagctctaatccattctgcgagtgacacacctaaaagccttatatttagatcatgagtgtgtagaaattctcctatcgcaatacaataatatgcttcattctcgcaaagataatgagctggaggtaatttctttgcattttgatcaattttacgttccaattctgttttatcggctaaattaaaatccgtataccatttacttctttgatccttaaatctcacttttgagatttcttgtgcatgtaaaaaatcttcattcttgggctggatgtgaattttcttattatctatatcaaaatctgtaccgataaaacgccatttttgttcaatgttcaaaagagacgaccacaaatcaaatagttcaatatgctctcttgcgactcttatgtgactcatgcgcatagtttcaagttttcctatattaccttttccacctcccatagacttcagtaaactccccgcaaactctgcaatactatcagctatacctaatacacgatttatatctttttgagcaggtaatattttttgtttaccttcatcaaacaatgagatgacgtatggatacacctctttaattctatgtatagaattcccattaatatactcaattagagaacctaacataatctctaaagaaagaataaatgttattacctctctcttctgaggaatttggtctaatttcctggatgatctcaatttataaaaatccttaaaaattgaattaattatattaattttttcttcaaaattatcaattaacttaatatcactcttataaactgctttaatgttagatatgactttttttgatatcttttgtctattattgtagatgttaaaacaaacgcctgagactctaacgatttctaaagtatcttccagagaattgttttgcataaattcgtttaaaaaaggaataaattcctttgaatctttaaacaaagcctcaagttcataatggttccatattttcaagttgttctctccttctatatttttttcaacaaatccactatatatatttctccatttatgtctagctataatcaagacttctatcgcatggggtttgtattgtatatctattacagctttatatttccgttaccaaaacccgcatgcaattggatcttatagacagtcaaatcttctccttggtttataataacccaattaatctcccttataataagcaactttatactttcctgaacttcgcttatgtactttgggtacgaattaatttcttaatgggaactatgaactatccctcattaaatgaaaactccattcctattagtttacttcccaatatttaaatttatacatactcttaaaggaatccgtttgagataaggcaattttctctgcttttctttcatcatatgaggacataccagtaataccaaacacctcaaatattatatccttgtctttattgataacgtatccatccggaataaaatttccataaccttctattggcaaataaggcttataaaatgttagattatcttcacataaccgatcatatatatttttttcatgagaactttcacaatataaacctctaccagatatcggtattaaacagtaattttttagagtcatacatttatgatacttgtcttctttatacacaaaacctgctaccacatattcagggctatgcggttctatttttttcttgtgttcatattcctccttttcaacatagaagcgattagttcgcccaaaagcatcttcacaatacagaatatctttttttgtattatcaaatagagtatcttctccaagcggtattacactatttacatacatgtaaacaaaatagatatctttttttacttttacattccatatgcctacttgtttataaaacatctcgtttaaagtttttctttttctcgataacctaattcgagccgatataccataaacatgtttagctaactcatatttatcattaggaactctatgtttttttcctaacaccatactttcccacgccatcatatttattcttgtggctaagccaaaaatcgttgatacatttttattagatcccgttccttcatgataaatcacattatttctcacattactgtttctttcgttattatcccctagctgagaaagatgtaattctttaattctaacaatatgtaatccctcttcctcatcgtagctccaggccttttcatatgggcttgaacccacaaattgaggatgtcggcaacaatccttggaatgtttaaattgtctggtagaattatataaatacggtgattttgcattggaaactttaagcactatcttatcagaacactcacaccttaattctatttctcccttttcattcctagtttttaagtttagtaacagagattcttttataggtgaataaggtagttttgttatgtttccttttggtttttcaattacaataaatgattttttgaccaatatatcccttcctcctatattaaacagactacaattcaattatagttgaagttaacacaaaaatcgttgaagaatttccaaaaatctcatattttagaattactattaaaaggaggaaaaaagaatcgaaaagacagccagggcaaaggctgcgcataaaaaaaacccggaaatcggaattgtttatttaccgaaatccaggtctgattacgaattgtttattttagttagacgattttaatacaagcttcgccacggcttccacatgagccgtctgcggaaacatatcaacaggctgaatatattcgacgcgatagtccttcgacatcgtctgcaagtctttcgccagtgtggaaggattgcaggatacgtagacgaagcgtttcggttttacttttttgatggtatctaaaaatgttctgtcacagccggttctcggcgggtcgacgatgaccacgtcagggcggaagccttctttcgtccatttcgggagccagtgttcggctgttcctgtgacatatgccgcgtttttgatgccgtgttttttggcgtttttcttcgcatcgtcaattgattctttaatgacgtccatgccgcggatctcttttgcgccgcttgaaacccacatgccgatcgtaccgacgccgcaatacgcgtctacgactttttcttttcctgtcagctgagccgcttgtttcacttcgtcatacagcttgaccgtctgctcagggttgagctggaagaaggcgcgggcgctcagttcaaatgacacgtcaccgagcacttcttgaatggcatggcttccggccagcgcttttgttttgtcaccgaaaatgacggatgtgcgcgcgccgttgacgttttgaataatcgatttcacttccggcagacggttctgaatggctttgacgatctcgtctttattcggcagtgtctctttcgcggtgacaagcacgacctgcacttcgcctgtttcaaaaccgactctcgtcacgatggtgcggacatcgccttttttggtccgttcgttataaacggatacgttgtgtttttccaaaatacggcggacgatacccgttgttttgtttgtcgccggatgctggacaatgcattccttaatcggaacgattttatgggaatccagtccgtataagccggcaatgatgctgccgctttgcgagcgtccgacttggaactggcttttgttccggtaattccaagggttgtccattccgatcgtatctttaattttcatttcttcgacattgaatctcgtatgacgttccagagactgaatgacgatgtcgcgtttttcgcgaagctgctgggtgtatgccagatgctgaagctgacagccgccgcactggtcgtagaccgggcatggcggcgtgacgcggtgttcagacggcttgcggatttttttgacgcgtgcttctgaaaatttcggctgcacatttgtcgcttcggcaacgacttcttcaccgggcagagcgccgggaacgaagacaacttttttcttaaaatagccgacgccctctccgttaatgccgagacgtttgatggtcagcggaaatgtctgtccgattttcaattcggcaggcgcctttttttgatgttgattcacgtttttttctctccgtttctatataaagccttcctcctgggaaaacggctgatttgaaatatcacatcttttcagtataacatgcagccggcggttccttcatgtttttcactggaagtttccaaaaatcctcatcattcaatacttctccacaaatataaggacgcatagcttaaatacggcgcccattcgctgcttacctggagcatcacgtcttttgacggtttatcctcaagggcgaagcggcgtttgacggcgttttgcaggccgatgtccgccaaaggaaacagattcgggcggccgaggccgaacatgaggacgttttggacggtccacgggccgatgcctctgatggcgatcagctttttcataatgtcttcatccgacaaatgggtaagttccgccagattgagcgctccttctgcaatcatccgtgaaatgtcaatcgcatattccgcttttctcatgctgaactggagctcccgcaagtcctgatactcaagcgccgcgatcgttttcggctcgggatagcaccagacgccgtctttttgttcaccgaaggcatggacgaaccgttccgttaaagtaaaagcgaaggacaggttgagctgctggtggatgatgcatttcatgagacagttgtagacgtcatattccaagacgagcggggttcccgcatgctcctcaaaaagcgccgacagatttgtttttgagaaatgatcaagcacaggctgaagcggctgctcccactgaaaaatgtgtttgatccgttcaatcatctcctcgcggtccgtttctccgctgacgagaaagaccgggtctgcggcggtgccttccgcttgaaccgtgatgacggacagtttgccgtcccgtgttctgagcggcactttgattgatcttgcatgaagatcgaccgcattcagcggatcgagcgacagcctttcaaggactttatcaaaatgatacggcggtgtgaccgaaaccgtttccttccacatatgctccacccctttttgtccaagtatatcatgaagcggccgggcggcaattcgtatacttttcttcataacgccgcatgatataatggcaggcggagggttgtttatgatacatataaccgcaatcacaacacataatgagatattagataatatccccctatcacgtacagaacaaccggacatcgcatggtactggattgattttttcggcgctgagatgcatgaaaccgagctgctgcgtgattattttcactttcatccgcttgcgatcgaggattgctttcagcatatgcagcggccgaaaatcgaccattatgacggctaccgtttttatgtgctccacgccttgaacccggacacactggaaatggaagaggtggacatttttcagtccgaccgtttcatcgtcagcttccatttgcacgaatcgcccggcgtctcaaaggtgagagaacggtttttcgcttctccgggattagccaaaaaagggcccgggcacatcacttatatgatgatggatcagcttgtcgatgaatatttccccgtgctgtacaaaattgaagaccggctgaatgaaattgaagacagcagaacacataaatcttacggcactttaatgaatgaagtgtttgaattgcggactgatcttttgaacctgaggcggacgatcattccgatgcgcgatttaatgtaccggattttgagccttgaccatgtaaaagaaagccgtgaaacgaaagcgtatttcagcgatatttatgaccacctgttaaaactggctgagctgatcgagtcaaaccgtgatatgacgtcagatttgcgggacagctacgtgacgctgaattcaaaccggatgaacgccattatgatgacattaaccatcgtctcgaccatttttatcccgctgacgttcatcgcgggggtttacggcatgaatttcgataacatgcctgagcttcactggaaatacgggtattttatcgttttgggcgtcatggccgttcttgtggccgccatgctgttttggttcgcccgtaaaggctggtttaatattttcaagtaagaacggctgccggctgttcttttttttgagaaaacatgatagtctggaaaaaaacgtaaagaggtgtgcgccgttaccatcctttctcacaaaatcatttcttctgtcctcctggctttcagtgtcatgtccattgccccgctgtataacggccgtacggtgtctgattacatctttgagttactcggcttttcctcttggccggaagatggagcccatatctccgtcattcccggggttgtgctttactttgcggcgttaatctggtgtgccgccgcgttcaggcggacgcttcccgcggcggggctgtttctgatctttctcagtatgggggccgcttccggtatcagtcctgccaccgaatatgccgttttttccttaaaacagttcgcgcccgaaaaagaggctgtcgaatatgtgaagcaccgcagcgaatgcagtcatctggttgagcgaaaaagagcgggcatgagctgcacactttatatcaatcattacggaaaaggggaacaaaccatttctgtcaccccggatttatcagaaaacataaaggacgtcacattcaaatcaaaaacattcactgtaaaaccccgttcaaaaacaatcatcaaaacccgatttaccggattttataaggggaaagccgcctcagactccggatggtcttcagaacctgaactgaaagtggcaatcctgtacacagcagattaaccattttgcatgtataatggtggaaaacttttcattggagggactgtgaaatgaagatcgccatcgtcggactcggcaatatgggccgccccatcgccgaaaatatcatgaaagccggatacagtctgactgtatataaccggacgaaagaaaaagcggctgacctgctggataaaggggcagaatatgccgaaacgccccgacaggcagctgaacatgcggacatcgtgctgtccatgctgtcagacgatgacgccgtaacagacgtgactttcggagcttgcggcattattgccgggttatctgaaaacggcattcatatttcaatgagcacgatcagtacggcgctgtcagaacagctttccgccgcacattcgggcagagggcagtcctttattgccgctcccgtcctcggccgccccgatgccgccgagaaggccgagcttcgcatcatcacagccggaccggcggaagcgaagaaaaaggccgaaccgctgcttaacatcctgagtcagcaagtatttgacactggtgaagaaacaaaaacggccaatgccgcgaaaatcagcgtcaatttcttgctcgtgtccatgcttgaggcgttatctgaatcgttcttaatgatggagaagtacgggttagaacaaaaacaatttttagaaatcgccggcgcgctctttggctctcccgtctatcaaaattacggcacgatcatggctgaggagaaatttcagccggccggtttcaaaatgtctttagggctgaaggataccaacctggcgctcgccgccgcagaacaggtttccgcaaaactccctcttgccgaactggccaagagccattttgaaagcgggatcgcacaaggcttcggggatctggattgggccgctttgattaaatgcctgaaataacaaaacacctctccattaccaggagaggtgttttctacaggcgcggcagcttcatttctttctcaaacatcaggtcatcaatgcttttaaacgtgtagccttcttttttcaaatcggtaatggcatcgtccagagcttctgaattgtcctttgaaacggtgtgaagaaggtagatcgcgccgggatgcgcctgctttatcatgtgatcataggcgtattgtttccctttttgctcgttaaccttccagtcgacaaatgcgacggaccagaaaacggtttggtagccgaggcgcttcgtttctttgaggacatattcgctgaatacgccgcgcggcggacggagatataggttgtcccgcttcccggtaatgttgtacacggcttccgtgacggaatcgagttcgtcttgaatctgatcgcccgtttttgtcgtcagatcaggatgatgaaaagaatgattgccgatgatatggccttcctttgacatccgtttaatcaaatcaggctgctctttcacaaaatgacccgtgacaaaaaaagtgcccgtgacgtgatgtttttttaacacatcaagcactttcggggtgtacccattttcatatccgttatcaaatgttaaatagatggtcttttctttcgtattgcccaaataaaaggcatcatattttttgaccagattgtccagctgtctgccggcatccggcggctgatgattgacgctgcgtttaaagccccagtttatccgttcattcggcacggcttctgcgctgttgatgcctcccgcaagtaaaacggccatgcagcaaattgaacaaaaccatttcatgaccagcactccttctgcatttttccttattttgcagtaggccctgcccttttatacagccgcattatggaaaaagaaaaaccccggcatccgccggggtttattcccaatcctttttaaagcgttcgtattttgcttccagatcatcaagcatgccgatgagccggtctatatcttcaacgtccgttgattcagggtctaatgaatcaatgacattcataaacatatcgagtctgttcttcaggtaatcgagctgctgatctttgctgtttactgcattccccatacttccactccattcattttttataatggtagcgtattttttgccgtttttcaatggttccgctacttgcgatcttggcagatcaggtctaaaattaacagttggcagacgttagtatgccccatttataaaggagttagatagtcatgacacaaaacacaacactgcgtccgatcacaccggagtacgatccttgggaagcgtacatggatgtcgaccagtatggagatatgaaactgacgaacgttgaattcacaacgacgactttgtgcaatatgagatgcgagcactgcgccgtcgggtacacgctccagccgaaagacccgaatgcgctgccgatcgaccttttattaaagcggcttgatgaaattcctctgttacgctctatcagcattacgggcggcgaaccgatgctttcgctgaaatcggtaaaggaatacgtcgtcccgcttttgaaatatgcccatgaacgcggcgtccgtacacagatcaattcaaacctgacgcttgatatcgggcgctacgaacggattattccttatttggacgtccttcacatttctcacaactggggaacggtcgaggactttgccgacatcggatttgcgatgatggagaagaaaccgacatttgaacagcgggcgcgctattttgacaaaatgattgaaaacagccgcacgctggtcgaagcaggcgtaatggtttcagcggaaacgatgctgaacaaacggacgctgccgcatattgaacatattcaccggcagattacggaagaaatgaaatgccagcggcacgaagtccatccgatgtatccgagtgatttcgccagcgcgcttgaatcactcagcctgaaggacatgagacaggccattcatcatctgctcgacattcgcgatgaagagacatggatgctgttcggtacgctcccgttttacgcatgcagccctgatgaagaagatcagaagctcctccgccgcctgcgggaagcgaaaaacgttacggtgcgaaacgaccctgacggccgctcccgcctgaatgtcaacatttttgacggaaatatcattgtcacggatttcggcgatacaccgccgctcggcaatattaaaacagacagccttcccgaagcatatgacaagtggagacagacgaagctgagcaaagagctgaactgccgctgcacaaacgtccggtgcctcggcccgaacgtccttgtcaaaaacagttattatcaggacacagatttttcattacgaaaagccagaggttaacaaaagatggaaacgacaattacggacattttgaaaagcaaagtggttgagatcatcatcgttgctctcgtgctttacgccggtgtttttctgatcaaccgctttgtccaggtgttatttaaacgcacggatttcttggaggaacggaaagggaaaacgattgaaagcctcgtccgatccatcacccagtatacggcgacgatcggttttatcttttacgtcatttctttattcgttcatgatttcggccgaattttagccggggcgggtgttgccggtatcgtcatcggttttggcgcccagtcgttaatcaaggacatattggccggtgtctttttaatatacgaacgccagcttcataaaggtgattacgtgacgattaacaatctgttcaacggcacagtcgaagaaatcggactccgttccctccagatccgtgagtggaccggcaagctgcttaccatatctaacggtgaggtcagacagcttcaaaactataacattgattttatgcggattaccgagtccgtcgtgatcagttacaaggaagatcccgagcgggtatatgccgtcttagaaaaagcctgcgatatgctcaatgatgagcttcgcgattcactgaagcgggatgaatttctcaatgcgacggagccgtttcaagtgcatggaattatgagtttgaacaaattaaccagaggcattgaatttacagtgaaaggcatggttcaagacacagaatacttctcggcgagccttgcggtgagacgcgttcttgcccgggagctgtacaacaacaatgtgcaattgctcgaggaaatgtatcacacacaaaaaagctgattcccgaaccggaaccagctttttttatttatctcggctgcgctgtcatttgaaaaccgaatgtgacgtgatcctgcaccggaatccaagccccgattccttgcgaagtcacatttttgacgacaagtttccgcttgctgcctttcagcaccaaatacacttcaccgtatgttacttttcctttttcattaacggccggagcgtaggcgtgcaggtagccgagccgctgcggagaaattttgtaggtttgatcgcgttttgtgcctgcgccgataaccgtttcaaacgcgagcggcagttttgttttcttcatcgctttttgcatcatcatgctttttacgtcttctgcgttcggcaccttcgctgtgagcccgcctttgattttgtattgctgttcttgggcgtatgagataaccgcggtttgctgtccgccccggttatccgctctgtttgtgttgatttttttatattcccagttggcgaccgtttcgttcgattgatagccgagcgcccatttcccgagaaatattgtcgcccggtatccgatggcaagcggtgaaccggaaaccgaggattcattcagcatctttatcagatgcggattttcgatgttgatctcggatgtatctaacaattcctttgccagtttgctcggctgaagcatcggctggtcctgtgaagcattcggatacgtattttcctttgaaatgcttacgacagagttgggaaccttaaacggtttttttgcagcggcagacggcgttgcgaaaaaactaaaggataacagcagaatcagtgtggcatgaaacagctttctcatcatatcactctttctatagcattttcctttagtcttttcctccgcaatcgttgttatccgcattttttacaggttaaagcaggaaaaaaccgatcgccataatgacataagcggcaaggagcgtagccccttcaaaccagttcgaatcaccgtcatttgaaatcatcgtcatcaaaaggacggatgagatcatcgcgacaagctcgggcaatgtgaatacaagcggcatattgaccggaaaaaagatggaacagatcacaagaaccggagccacaaacatggcgatctgcaaagtcgagcctaccgcgatttcaacggcgacatccatcttgtctttgtacgccataataatcgccgacgcatgctctgcggcatttccgacgattgcgacgataatcactccgataaacagctcgctccagccaaactgttcagccaccgcatgaaacgtatggacaaggttttcagatatgtaggcgacgataatggttgaaataaataagacggctgtcgctcttttccccgaccactcaggctgctcctcttcttcctttgcctccggctgattcggctgataaacaccgcggtgggtgacgagcttgaaataaagagctgccacgtacaaaaggatcatgatgatgctgatgccgacactcaaatcaagcttgtttttttcccccatatccatggaaaacacttcgggaatgacaaaagcaacgataatggcaaaaatcagcaagccggaattatgccgtgcatcatgaatattgaattcctgccgcttgtatttcaaaccgccgataaaaaacgacagtcccgcgacgagcagaagattgccgagcaccgaaccggtcagtgaagcaagcacgatgcccgtcagcccttcttttagggcgaaaagcgatataatcagctctaccgcattgccgaacgtggcattcagcagaccgccgatccgcggtcccgcgataatggcaagagattcagtcgctctccccatataacttgcaagcgcaataatcgtcaagcaataaataataaacaaaaccgctgacggccagtgcatcaggccgccgatgactgaaagcggcactcccgccgcagctgtaaagaaaaaaatccgattcatatctgcctggctccttttttcgaatgagtctttttatatccttctcaaaaactccctcaattacacttccgcggcagcccgaattggcattttcaggttgccggacgcgacaaatccgtgtacgatcaagaaagatactgaagaaggagaaatacgcgatgtcacgactgtacttctttattttggttctgcttgtttccatctccggattttcccaaggcatgcttctgccggtgatctccgtcatttttgaaacgaacggggaatcagccgctataaacggacttcacgcaaccggcctttatatcggcgtgcttctggcgtcgccgtttatggaggccccgctgcgcaagctcggattcaaacctctgatggtcatgggcggatttcttgttatcatcagcttattcagttttatttggcttcaatccatatggttatggttttttcttcggctgcttatcggaatcggggatcatatgctgcatttttcaacccaaacgtgggtgacgtcaaagtcaacgccccgaaacagaggaagaaacatttcgctgtacgggctgtccttcgggcttggattcgctgtcggcccgttcatggtccctcttgtgaaaacaagtccgtcccttccgtttatcgtatccggctgtatcagtcttgccgcctggctgtttgtatttgtcttacgtaacgagtacccggcgcaaggtccggatgaaacatccggggataacagcgcaaaacggttttatcgcgcccttcttttcggctgggtcgcttttctcccggctttcgggtacggttttttagaaacggcgctgaacggaagctttcccgtgtacgccctgcgcttaggcatatccgtcgatgccgtcgcgctgatattgcccgcttttgccatcggaagtattgtattccagttccctctcggtttattaagcgatcgattcgggagaaaacgtgtcctgctcgtcatcttattaacgggtgccctttgctttttgacggccggactgtttccgtcgccttctgtcatcggctgctgctttttcacggcgggaatggcggtcggcagtatgttttccctcggcatcagctatatgagcgacctgctgccgtcccatctgctgccggcgggcaatctgctctgcggcatttccttcagcctcggcagcatgatcggcccggtggcgggcggctggtatatgcagcggtttgaaagcgccaatttgttttactttattacggtgattctggtctgtatttggcttgcgctcgtcttcgggaaaacaaagcacagtcccgcatccgaatcccattcttttccgtcctcataaaaaaagccgcctgatctaagtcaggcggcttctttctagtggtatccgttctgcccgttagcgcttccgcttgttttattcttcgggccgttttttgagttttgtttattatggcttccgccttttttcgtatgcttggtcatagccgattccctccgtttttcagcttgaacgtcatccgttcctctatagcttgctcccgcggtacggattttcatcaggaagctttttacgtttatgtaaaagcgcgttgatttcgcctcctaaaatcagcagtgttcccgtaaggtaaaaccagatcataaggacgataattcccccgatgctcccgtatgtggcgctgtagttggcaaaggtgccgacgtaaaatgagaacagcatactgacgataatccagccggctgccgcaaatacggctcccggcagcacaaaacggagggaaagccttttattcggcgcgaaaatgtaaagcgcggtaaacacgattaaaaggataagcggactgataccccagcggacaaccgaccacacctgcaaaaacaggccggaggcgccgatgaaatctgcggccagcattccgatttctctgccgaacaccggcagaagcaatgcgattaaaatcgtaaccaccatcgcgatggttaaaaaaattgaggtcaggcgaatgatgataaatgagcggttttcctcgacttcgtaggcatggttaaatgctctgacaatcgcgttcataccattcgaagccgaccagatgacggcgataatcccgaatgacaaaagcccgccgctgcgcttgttcagcgtttgctctgttatggatttcaccatagacatggcgctgtcgggcgcgtattgatcgaccgccccgagcacgtcttctgccgatatgggaagataggcggtgagcgtcagcatgaaaatcattaacggaaacaatgacagcaggaaaaaatacgccagctccgccgatttactttgtccttcatggagagaaaaccttgcaaacagctcctttataaaactcatgacatcccacctcaatgatcgtttttcgaaaaatgctccttcgtttcttttaacaggtcaatgacctgcggtgtcgtctgcttcagcttagtgatctggccgtttaaaaaactcagatcatccgatacggtattggcgatggtcttcacttgatcaagttttgcagatgcctgctgtttcagcacttcaggatgttttcggtagaatgccgcacgctgcctgcacgcgtccatgttccggaaacatgcctctcttgtcggcttatgtaataaggacagtgctcccccggcggcagcgccgatcagaatcgcttttgccatgatgcgtgtctgcttcatcggtcaatcccccttataaatgatggtctttctttattgtctccagcaaatgacggcacccggactcgaccaaagcgtacacctcgctgaaattcccggtataatacggatcgggcacgtccgcaaggtccgactccggtacataatcaagcagccttgcaatacgcggcgccgcttttttataaccggccatgctgcgcagatgtccgatattttctgcatccatcgcaatgacgtaatcaaaatcggtcagatcagactcacgcacctgcctcgccgtgatgccgcttacgctgatccctttctcctttaggatctcctttgtcccttcatgcggcggatttcccgcatgccaggcgccgattcccgctgaatcaatgttaatctgcccgttcagcccgtttttcttcaccatatcagaaaataccgcctctgccataggcgaccggcaaatatttcccagacagacaaacaacacatgtatcatatcgataacctccctagtctttccccgcattttgaggatcaaaaaccttatcatcatcttagcaacttttctgctgctgtggaaataagcttttattctaaatgaattctgttagaataaagggtacgaaaacggtcatgaaaggatgcatgaatttgccgagccaaaaaacagaaacgttaaacaaaatgattgaagacatttcgcaaaagctcaacatgctcaatgtcggcgtcatcagagcggaagatttcagtgatgaaaaaatagaagatcttacataccttcatcaaatggtcatgaaaaaagcatcattcagcccgagtgaaatgcaggccattgccgaggagctcgcctctctcagaaaataaacccatgtcagacctgccgaaaaacggcgggtctttttttgatttaaaaaagtgaaaaataaaagttcatcggtttgacacatataaaaagaaggagtatagtaactgtgaacttggtagaacgatatactaaatgagcgggccgcttatctttttcctatttagtagaacgatatactcgttgtgatatcagcgttattcaagtttgtctctgcaaccgttttatcaaaccagttttcaaagaaaggcagtggttcaataaaggggaatggttctgtgcttttgttaatttaaaaattaatttaattctttattaaccgcattaggggatgtcatcatgaaaaacatatacaccaaaatggcagcgggtctttatgttaattatttcctgctgggcatgatcaatattattatcgcatccaatatggaggcattatcaaaacagcttcatacatccgcagccggggtcagctatttggtctccgccatcgggatcgggaagctgatttcgcttctgtttgccgggaagctttcggatacattcgggagacggccgtttatcgtgtcgggcgcctttctgtatctgattttcctaatcggaattccgctttcgacaaactatacggccgcgtttatcttcgccattttcgccgggatcgccaattccttcttggattccgggacatatccggcgcttattgaaggatttccgaaaaacgcaagctctgcaaccgtgttaatcaaagcgtttgtatccatcggcgcgacggtgcttccgttttttatcgcgtttattgcggacaggcatttgttttacggctggacgtttttcgtaccgggcattattttcttcctgaacggctttttcctgttaaaagttccgtttccgaatcataagcaaaaagaagacggcggccggacggaagcctctccgtctgatgacgcgttcacatcacagccgtcgatatggcgtgaaggccttgcgatcattctgttaggcttttcatctacggcgctgtttatgctcgttcaagtatggcttcctaagttcgggcaaaccgttttgggcatgcctgaggtgcaggctgtcaaattgctgagctattacagcatcggtgcgcttgtgtccgtattattgctggccgtgctgttaaacagagtgattcagccgattacggtaatggtgctgtaccctgtgatcgcggcaatcgcgctgcttgctctgattttcattcatcagccggccgtatcagtcatcagctcctttgtcatcggactttcaactgcgggcattctgcaattggcgatgacggttatggctgttttattccctaaaaataaaggtacgatcacatcttttgttaatatagcatcaagcttatcttttattgtcattccgcttgtaacgggagcgatatccaaagcggccggcctgacgcctgtttttctgcttgatatcggaattgcggttgtcagcgcccttctcgcattgtttatcggaatccgctttaagcaagtgatgaaagcctgactattttttaagggagaggatttatcatgcaatctatcacgatcagaaacacggtcatcggcgaagggcttccgaagatcattgtgccgctgatggcgcccggagagaaagaactgctcgaagaaattgaagccgtcaacaggcttcgcccggatatcattgagtggcgggcggatgtgtacgagcacgttgacagcctggacgccgtaaaaggcatgcttgaaaagctgcggaaagccgcaggcgcaacaccgctgcttttcacattcagaactcataaagaaggcggaaataaagttattgatgatcgcttctacattgaattgcttaaaaccgccatcgaaacaaaacacattgaccttgcagacgttgagttgtttacgggagaagcggaagtcaaatcaattgtgaaaaccgctgaagacaacggcgtatatgtcgtcatgtccaatcatgattttcatcagacaccgaaaaaagaagaaatcatttcccggctgcggaacatgcaggcgtacggcgcgcacattccgaaaatcgcggtgatgccgcaaagcactgaagatgttttcgtcttattggatgccactcacacgatgaaaacacaatacgcagaccggccgatcatcacgatgtcaatggcgggaacaggtctgatcagccgcctggccggcgaagtcttcggctcagcgtgcacgttcggagcgggcaaagaagcatcagcgcccggacagattcccgttgaagaattgcgcagcgtactcagcattttaaataaacatatgtaatcagcgttttttgccctcaaagcgggttgaaaaacaaatgaatggactaacggaggaatacatcatgaagaaagatttaggacggattaacggaaaaactcagcttatcggattattcgcgacaccgatcggacactctttatctccggcgatgcacaacctggcgtttaaaaaattaggattgaactacgcttacctcgcgtttgaagtcggcaatgaacagctggaagatgtggtaacgggaatgcgcgccttaaacgtcagaggcttcaatgtctcgatgccgaacaagatgaacattctcccttacctcgatgaactcgcggattcagcgaaattcaccggcgcggtaaatacagtcgttaatgaaaacggcagactgatcggacactccactgacggtatgggatacgtccgcaacttaaaagaacacggcatcgatatcacgggcaaaaaaatgacgctggtcggttccggcggggccgccactccgatagcgattcaatccgcattggaaggcctcggagaaatctctattttcgcccgcaatgacgcatttttcgaaaaagcggaagaaaacgtccgcatcatcaatgaagaaatgaagggatcttcttgcaaagcgaaagtcttcccgctcgaagatcaagatgcgctgcgtgctgaaatcgcttcaagcgatattttcacaaacggaacgggtgtcggcatgaaaccgcttgaaggcttgagcgtcattgaagatacatccatgctccgtccggatttgattgtgacagacgtcgtttacaaccccgttacgtcgaaattgcttgaacaagctcaagcggccggctgcaaaaccattaacggcctcggcatgatgctttggcagggcgccatggcgtttgaatattggacaggccgtgaaatgccggttcagtatattaaagagcaaatgtttgaataacctattgtgacagaagcgccgaaggacaatccgtcttccggcgctttgtcattttctcccctctctctttcttctcagccgtcaaaacgcttataatggatgtaacgaataaaaaaccaagtgaggaatgcgacgtatgagacagcaaaaaaaacgccgggtgacattgcagcaggtcgctgaacatgccggtgtctcaacatccaccgcttcattaatcgtccgcaataatccgcgaatttccgaagcgacccgtgagaaagtgctgcaatccatgcgggagctggggtacgtatatgatcgggtcgccgcgaatttacgatcacagacgtccacaacggtaggattgattattactgacatttccaatacgtttttctcagagtttctgatcggcgttcagaatacgcttgaggaagtcggattaacagtgctgttaggcacgacatttgattccgtcgccaagcaggagcagctgatctcgaccatgctggagcacagggtcggcggattgattttgtgtccggtttcaggtacggctgaggaaaccctttcccgccttgagcagcttgacattccggtcgtgctcgccgtcagggagattgccgatgccgactgtgattttgtcggagccgattatgaggaaggcacctataaggcagtgcgtcatttcattgagaaaggccatcaggagattgcgtttctgggcggcgtgaagcactcatcaacatggacgaagcgcatgaaagggtttaaaaaagcgctccgtgaagcggatctggaagtgaaaaatgaatatgtcattgacagcgcgccgacccgcgaagcaggctgtgaagccgtgacggagctcctccgccggtctgagcgcccgaccgcgattttctgcttcagtgatttggtcgcgttcggcgtcatgcaagggatcagaaaagccgggctcattccgggcgaagatattgacattgtcggctttgataacgtgccggaagctgaaatttcttatcccccgcttacaaccgtttcttcctttccgcggcagtcgggaaaagaagcggctcaattgctgcatcataaaatcaccagttcccagcacaaaaaacaacgcattattctggcgcctgagctggtcatccgggaatcttcacaaaaaaagcggaacgcctgatacggcgctccgcttttatattacgcaagcagttttaatgattcgcggttgaatgccggtatgtcatccggtgtgcggcttgtgaccagctggttctggcagacgacgacttcttcatccaccacatttgcgcccgcgttttccatgtcgattcggattgatgtaaaccctgtcgctttgcgcccgtccaatgctttcgcgttgatgagaagctgaggtccgtggcagatggcgaacaccggttttttatcatccataaacgctttggcaaattggacgaaacggtcatccgcacgcagcatgtcaggagagaatccgcccgggatcagcaatgcgtcaaagtctttcggatttacattatcgatggacgcgtccactttcacttcggcttccccttgtttgcctttgactgtttttcctttttcctgttcaattacggttaattcatgacccgcatctttaaaagctttcgcaggttcagtatactcgacatcctcaaaataatcggttaatacaactgcaatttttttacccatagttactacctcctgcttgatgaagtctacataaatccatgtaccccagccacactaacatcaaacataggtaacgcgtttgccgctcatccgttttacataggtcattatcctcatttttcatctttttacaagaatcatcatgaaatctatataaactttcacaaaatattcttacaatggtactgcatgacaaaatttgttgaaaggtggagaacaggtgagaatacagaaaagacgatgcagcgtcaatatgacactccgtattctgctgcccctagttatgatacttagtctaatcctcccaacatcacccattaaagcagaagaaaacaaatcctccagtgtgaatctcagcattttagccacaactgacgttcacgctaacatgatggactacgattactacagcgacaaaccgacaacggaattcgggctggcacgaacggctcagcttattgagaagcacaggcgcgaaaacccgaatacgctgcttgtcgataacggagacctgattcaggggaatcccctcggagaatacgccgtaaaatatgagaaaaatgatattatttcaggcgcaaagacccatccgatcattgaagtgatgaacagtctgcattatgacgcaggaacactcggcaatcatgaatttaattacgggcttgaatttctggacgggacaatcaaaggcgctgattatccgatcgttaacgccaatgtgaaaacattaagcggcgaaaaccgttatacgccttatgtcataaaagacaaaaccgtcacggatgaaaacggcggcaagcatcagataaaagtcggctacatcggctttgttcctccccaaatcatgacgtgggataagaaaaatctcgaaggccgcgttcaggtcgaagacattgtggaatccgcaaagaaaaccgttccgaaaatgaaagctgaaggagccgatatcgtcatcgccctcgcccacagcggcatcgaaaaaaaagcgcagtcttccggagcggaaaacgccgtttttgacctggcaacgaaagtcagcggaattgacgcgatcgtatccggccatcagcacgggcttttccctgatgccgaatataaaggcgctgatcaatttgacgtcgatcaaggcacgattaacggcatccccgttgtcatgtcaagcagctggggcaaatatgcgggcgtcatcgacctccggcttgaaaagacagacagcgcgtggcatgtggaagatgcaaaaggcagcatcgagccgattgccggcaatgtgacgtcggaaaacgaaaccgtcgtcaataccgttaaaaaagcgcacgaaggcacattgaaatacatcagagaacccgtcggccagacaaaagccgatatcaacagtttcttcgcccaagtcaaagatgatccgtccattcaaatcgtaacggatgcacaaaaatggtacgccgaaaataagatgaaggatacggaatacaaagatctgcctatcctctcggcgggcgccccgtttaaagccggcgggcggaacggctcaaattactatacaaacatttccgctggcgacctcgccatcaaaaacatcggcgatttgtacctgtatgacaacacggttcagatcgtcaagctgaacggaagcgaagtgaaagactggctcgaaatgtccgcggggcaatttaatcagatcgatcaggcaaaaggcggcagccaagcgcttttaaatgacgcctaccgctcatacaattttgatgtcattgacggtgtcacctatcaggtcgatgtcacaaaaccggcgaaatacaacgaaaacggaacagtcattcatcccgatgcaagccggatcgtcaacctttcttatcaaggaaagcccgtcagcgccaagcaggaatttctgatcgtcacaaataattaccgcgcttcaggcggcggaggattccctcacttaagcaatgataaaatcgtatactcttctgccgatgagaacaggcaggtcttaatggattacatcatccagcagaaaacgattaatccgcaggctgatcataactggtccatccttccggtcaaagggacaaacctgacatttgaatcttccttggccgcaaagccgtttgctgaccgcgcagatgacgtcgcctatatcggtgaatcacaaaacgcgggctacggacagtacaagctccaattcaaagatgatgaaccgggcacagatccgccgaaagatgacgcatggaaactcaccgttatgcatacaaacgacacgcacgcccaccttgataacgcggcgaggcggatgacgaaaatcaaagaaatcagaagcgaaaccgaccgcagcattttgctggatgcgggagacgttttctcaggcgatctctatttcacaaagtggcaggggctggctgatttaaagttgatgaacagcatgggctacgacgcaatgaccttcggaaaccatgagtttgataaaggcccgggtgctctcgccagcttcctgagcggtaacgggagcgcggctgacccgtccggaaaatacaattttcaagcgcctgactttccgctcgtcagctcaaatgtcgatgtgtccaaagagtcaaaactcagaccattcatgaaaaaagcagacacatttacggcagggaaaaagaaaaaagcaggcatctatccatacattctgcttgatgtaaacggagaaaaagtcgccgtattcggcttaacgacagaagatacgtccgtcacatcaagcccgggaaaaagcattgtctttcatgatgccttccaatccgcacaagatacggtaaaagaaatacagaacaaggaacatgtcaataaaattattgccctgacccatatcgggcatcagcgtgatctcgatcttgccaaaaaggtaaaaggcatcgacttgatcgtcggcggacatacgcatacgcttgtagataaaatggaagttgtcaaaaacgaagagccgaccatcgtcgcccaggcaaaagaatacggcgaatatttaggccgtgtcgatgtcgcatttgacaaaaacggcatcgtcctgccggaacaatcctctcttcaggcgattccggtgaacgagcagacgaaagaagacccggatctgaaaaaagagcttgatccgtttaaaaaagagctcgtctcagtcaaaaatgaaaaagtcggctcaacgaaggtcgcacttgacggccagcgcgagcatgtccgctccaaagaaaccaatctcggaaacttcatcgcggacggcatgctgcaaaaagcgaaggaagcggccggcgcccaaatcgcgatcacaaacgggggcggcatccgcgcgggcattgataaaggagacatcacactcggcgatgtgctgaatgtgatgccgttcggcaacacgctttacgtcgcggatttaaccggaaaacagatcaaacaagccctggaacaagggttaagcggaattgaggctcaaggcggcgccttccctcaagttgccggtttaacatacacgtttacactgaataaaaagccgggacaccgcgttcttcaagctgcggccgtacaggatgacggcagcgtaaagccgatttctgataagaagacatacagagtcgccaccagtaactttgtcggtgaaggcggagacggatattccgtctttaacgaagcgtcccataaagaagacctcggctttgtcgactatgaggtcttcaccgagcagcttgaaaaagcgggaaaagcggtggaaccgaaagttgacggccgcgcgcaggaagtgtatctgccgacgaaacaaaaaaacggttcgtggacgcttgaagatgacagcgcatttgccgcctatgccaaaaacgccaacacgccgatcgtgtattacgataagaatgacggcgccaaaaagccgattgatctcagcgtgaccaaaaaacaaatcggcctgttaaaggacagaacatcggattcttcccttacgatcctgcatgacaagttcagcatgaaaatgccgatggcaaatgctgcttcagctgatacacaattcggcgtgacgccgaaaggaaaagtaagcggggcgctttcaaatgtatacgactttacaatgaagcagaaaaacaaagacatcaaaacattcaaagcgccggtaaagctcaccctgcgcattgagaatacgaaaaaggcgaaacagccgggcatttaccatgtagaccggaaaaagaacgtctatacaaaaacagacaacggttcggtttcacacgatctcgtcacgggctatacaaatcatttcagtgaatacaccgtattaaacgcaaacacgaagagcgcgccgccgacaagcggagatcacggctccggaaagcagccaagcggacaaaaaccgtcacccggccctgcgcaggacggagtatcgccgggcggcctgcttcctgatacggccacaacgatgtattccatccttcttgccgggttactcatcagcgcgctcggaacggcactgtatctgcatcaaagaagaaaagcaaaaaaagtgaacgacgcataaaaagaccgcttttatcgggcggttcatccaaaagctctcctgatctgatatcaggggagctttttctctcggtccccctctgagtcgacagccgtacggccgagtgataaaatatgaacgttattcgcgaaagactgcatccgcatcgtttaacacttcacggcagggcctctctttcccacggcgccgcctgtttggaggactttttttgaagataacaggacacaaacgaaaccgcatgtcttacaagaaaaagctgttttacgtgataacagcgctctgttttatcagctcgttcattttcgtcactcacaacgcttctttttatgagcggccgattgccaaagtgacgaaaacaacattggaacatcagtctgacgtacaggacatgcataaaaacaaagataagattttcaatcagacgatcacagccagacttgaaaacggcagtcagaaaggacagctcattcatttgtccaatcagtattcatcatccggagcgaacgatcagaaatattcgattggagatgaagtattcgtttctattgataaagggaaaccatcaaacaaggatatatcgggaagcattatagataaaaaacgggataaacagcttttgctgatcgcttgggttttcatcttcaccttgcttatcgtcggcaaaaaacaaggcttcttttcgatcgtcagcctgatgtttaacgccgttttactgtcgtttgcattagatttgtacaggaagcatcctaatatagggttaattttcatctgcggtatctgtattctcatctttactgtcatctcattgctgcttgtcagcggttttcacgcgaaaacatacgctgccattgccgcgacgctcgcaggcactttcgtttccctgctgattacgtatttggtgatgctggcaaccggtgagaaaggtctcagatatgaggaaatgcagtatttaacccgcccttatcacacggtgttcatggccggggtatttatcggatcactgggagcggtcatggatgtggccattaccatgacgtcatctgtcttcggattatatgaagaaaacaagggtatctcattacaagctctcagacgttccgggatggagatcggaaaagacatcatgggggcgatgaccaacattctgttttttgcttatataagcggctctattccgatgatgcttttgtatttgaaaaatgattccccgataggattcactctttctatgaacatttccttggaaatagccagagcattggccggagggatcggaatcgtattagccatacccgccagtctgtatgcttctatcttttttattaaacgaaagaaggcaagctcatgaatgtcatcgtaattctcgcggcgattttatttctattgatggtcatcatcggcggaaaaaaaggagcgaggtcttttattgcgttattcttaaatttcggtgttctctttctcaccatcattttcatgacagacccgcatatcaatccgattgttttaacattgctctcttccgccgtgatttgcagcattactcttttttatattaatggaggaaacgtcaaaaccgtaaccgcctttatttccgcaatgctgacgattgtactgctgctgttttttattatgtctgtaacaaaacatacttcgattcagggattcggtgaagaagaattgggtgatatcggcatattcacactgtttgtcggggtggattttgtgaaggttaccgcagccatgatcatcatgggcacgataggggcgattaccgatgtcgcgatttccattacttcacccatgcgggaaatttacagtcataatccgtccatgagcagaaaagatctgtacacattcggattaagcatcgggagagatattttaggaacaaatacgaatacgttattctttgcttttttcggtagctatttggctttaattatctggtttaaagacttatcatactcagctgaaaaaatagtgaactcaaaagtattcagtgcggaagccgtcaccattctttgtgccggaatcgggatcggcatcatcattcccgttacatcctggattaccgcctgttttttagcaaaaccgaataaacgttaaaagctgccgagacatgcccggcagccttttttatcttatacccactttacaacgtcttttgaggcagatcttgttttcgggcgcggttctctgacacggtagccgaatgcggccataacagagatgtcgaaacttccgttttccagaagcccttcttcttcaagaatccggtgaatttctttgtagttgaagccttctacagggcaggagtcgattccgatctgcgcagcggctgtcatcatattgccgagagcgatgtatgtctgtttggatgcccagtcaaacagcgcgcgatctgattcaagcagattgaaatcatttttctgaaagtcttccgttttgctgatatagccttcatacatatcttccggcatttttttgacttcccgcaagtggtttttgacatagtcggcgtcaaaacggatatcctttgccgtccgggcaagcagaagtacgaaatggcttgcggtcggcagctgcttttgcgcgccccatgtgaactcgcggagtttttcacgaagctccggattttgaacgacgacaaatttccaaggctccaaaccgagtgagcttggggataatcttcccgtttctaaaatgaattcaaaatcgctttctgaaatttttttctcaggatcaaattcctttgtggcgtgtctgaattgatacgcttcgatgatctgctgttttttatctgacattcatgatctctccttttcaatcgttatgtactattgtagccattatttttgaaagtaccagtacgcacatttttgtgggatagtattcattttgatactgacaaaaaaacgggctgccgcggcagtccgtttttatttttctcttctcgcaaagtcgacgaaacggaatttatcgagcctgtgccggctttccgtgtactgaaagaggctggtatcgtccaaaaagacgcggtttttcacgaccgccatatggctgaatccgccgagatccaaatacttccggtcctcttcccccgccggctccacgacaatttccttttgcgcgtagctgatggacaggccgagctctccttcgagatactcatagatcgaatcttcacaaatcgccttcgtcagtagaggcacatgtttttttacaaagtaatccttgtccaaaataatttgttctccgtcaatccgtcttgatctgacgacttcccacaccttttcatccgcttctgtaccaagctcttttgcggcttctgagggaggcaggatcagcccgagacggtgaaccgtcgttctcgtctcttttccgagcgtttccgaaagctccttgaagctgatcaggcctgagacgggaaaacgcattttttctctgtctaatatgacggagcctttgcctttgattttctggatgtagccgttttgcgccagcatattgagcgctttgcggacggtttctcgtgatgtgccgtattgatcgcacaaatcattttcagacggaagaacgtcttcagccttccgctggccgctttcgatctgccgcaccatatctttatagattgtgatgtatttattcactttcatttgaccacccagattagtgtatcacgcttttgtcagatgataaacgatcgattcatacggacggagcgtcaatcgttccggccgcccttccctcggttcatcattcgtcagcagcaccgtaaaccgccagccgtccgtgtcttttagcggaaccgtaaagtccgcttctttcccgtagaagttgttgatgcacagcagtttttcatccttgccgtgtctgacgtacgccagaaccgccggatcgtcttcagcaagcagctcaaacgttccttcagtcacgatgtcatattcttttctgagcttgatgagcttctgataatgatagaaaattgaatccgggtcccgcaaagccgcttccgcgttaacgtcccgataatcatccgccgccggaatccaaggcgtgcctgtcgtgaaaccgccgtgcggcccgctgttccactgaatgggggttcttgcattgtctcttgatttctcttttaaaatggcgataatgtctttttcgggcacgcctttttccttcatctttttgtaaatattcaatgattcgacatcgcggtatgagccgatgtcatcgaattgcggattgcccatgccgatctcttcaccttgataaatgtaaggcgtgccctgcatcatatgaatggccgccgccagcattttggctgatttcgtccggtatacgccgtcgtctccgtatctggatacggcccgcggctggtcatggttgcaccagaataatgcgttccagcctccgcctttttgcatctccgtctgccaaaacgctaaaatccgtttcagcttcagaaaatcaaacggagcgagcgcccatttttcaccattcggataatccacttttaaatggtgaaagttaaaagtcatatcgagttctttattctcagggtttgtgtaccggatgcagtggtccgccgttgtcgaggacatttccccgaccgtcatactgtcatatttcgaaaacacttcccggttcatctcatggagaaattcgtgcacgcgcggcccgtccgtataataagggcgcccgtcacgcccatcctcggcatcaggaaacgattggtctttagaaatgaggttgatcacatccagccggaagccgtcgatccctttccggaaccaaaaatgcatcatgtcgtaaacctgttttctcatctcttcattttcccagttcaaatcggcctgcgacacatcaaataaatgcagatagtgctggcctgacgccgggtcgagctcccaagcggaaccgccgaattttgattcccagttgttcggcgcccgtccgtcttcctttccgtctttccaaatgtaaaaatcccgatacggactgtcgggtgacgagaccgcttctttgaaccaccgatgctcgactgatgtatggtttacgacaagatccatgacgaccttgattcctcttttgtgcgcttcatcgagaaggcgttcaaaatccttcatcgttccgtattcttcaaaaacggtgcagtaatcgcgaatgtcataaccgttgtcattctgcggcgaatcgtaaatcggcgtaagccaaatgacatcaatcaaaagcttctgcaaataatcaagcttctcgataataccgttcagatcaccgatcccgtttcccgtcgtatcattaaagctcttcggataaatttgatataccgctgcctttttccaccatggtgtgctgtctgttttcatttttcttcaccgcctgtaatgttttgaattgaaagggaaaagggacagcctgatagaaggcgccccgcaggttttctatttttgccgtttcagccgcgcatacccgtatgttcccgcaaacgggagaatcagcacgatcagcattccgatcgcaaacggaccccagtaccggctcataatggagaagatccccggcacgccgccgactccgaccgagcttgcgagaacgcctttgacggagatgaacatccccgcgattcccgaactgatcatggcgatcacaaacggaaatttgtaacgcagattcacgccgaaaatcgccggctcggtaatgcccaaatatgcggaaatgccggccgtcagtgaaagcccccgctgttttttatcttttgtaatcagcatcatggccaaagccgccgatccttgagcgatatttgacaatgcgagcatcggccataaaaatgtgccgccgagctttgatccgattaattgaagatcgaccgccagaaacgtatgatgcatccccgtgattacaagcgccgaatacagccctccgtacagcaggcctccgatggcggagaattggccgaaaacggcaatcaatcccgccgtcagcgcgttaccgatcgcaaaggtaatcggaccgatgatgacaaaggatagaaaaccgatgaccaaaagcgtcaccggcgcgacgaccaacagctgaatgccctccggcgtccgtttcgtcaaaaagagctcaagcctggcaagtaaataagccgccagcagaatcgggagcacctgaccttgatatccgactttctgcacctcaaggccgaacaggttccacaccggaatatcgccgttctgctcggcggccccgtagccccatgcgtttaacagatcaggatgcaccagcatcagcccgagcacgatgcccaagagcgggcttcctccgaaccgcttcactgccgaccagccgattaaagccggcagaaaagcgaaggccgtccccgcgatcagattaatcatattggcgagatccgcccattgcggatacacttggacaatcgatttggcgctgtagaaaatgccttccgccgttaagatgttgttcagacccattaacagcccggccgtgacgatcgccggcaagagcggaataaagatgtccgcaagcgttttcacagcacgctgtaaaggattcatgttttgcgccgccgccttcttcacgtcatccttggacgcttcgcccatccccgtttccttcactaattccgcatatactttgttgaccgtcccctgcccgatcacgacttgaaactgcccgtttaccgcaaaagatcctttgacaatgtctattgcatcaagcattttttggtttactttggtttcatctattaatgcaaaccgcaaacgcgtcacacaatgagtcgccgcctcaatattttcgattccgccgacagcttcagcgatctgcctcgcagcccggttaaactcacccatgccaacccctccgtaaccgttttcattttgtctcacaaacttgtttatacatgtttatgactctattgtaatgatgtatatacatgtcgtcaatctatttttatagcgctttcatcacaaatatactgcgaaagaccctgaaacaaaaaaagccccgccggaaccgggccttgacttcttgttttatcgggaacatgtccgggcggaattcacaacaggagcacaaaaagcatacagtactgtacaactaagttaaagaggtgtgaagagatgccatccactgttatcaacctgtactatttgaagattaacagtatttctggcaacggatctattacgattggggaagcggcatacaacagtcccaccacaaataacaaatcacaaggactgaactcttcattcggcgatacgtcacctatagaatcgatgatggagaacttgttaaatgatcctgatgtcaacgaccagacagaaataggaaccgcagataccgcaaatgttatgccggtaccgccgactatagattaaaggggtttttatgaatgccttaccaaattaacgtcgtcaatataaaagtaaacggagcaacgcaaaacggaaacgtcgatatcggtcagaccgtgcaaaacagccacaccgccaacagcaaatttgtcggcgcgaacttttctttaggggatttttcgccggccgccggatgtttgaattcgggccatcttgaccctgacgtgagcgatcaggatcagatcgccaacccgtcaatgccgatcgcaaatcaaatatagggaggttctgccgaagtggatatcgaaaaaatgagaaagtggcttgagattacgaacgagcacaagcccagcgacttttggaccaatgtcctgaaacggaaatctcccgaagattttttctccttacaaaaaaacaccctgacttatgatatttatcaggatgaacagcacacatttgtcattgtggaaatgcccggcgtttacgaagaagaattgacattgaggctgctgtcaagaacacggctgcatataagaggaaacatcacacccctttttccaaagaacatgggcgtctgccaaaaccggtattacggggaaatcgatgagacgattgagcttcctgaaccggctgagccccgcctgttacaggcgcagtgcgtaaacggcctgctccacatttcctacccgcgccttatggagcacattccttttcagaaaaaaatctaaagagccggcttacgggcggcccagccgtctgtacactttctccttataatgagaagatgcgggttttgagaacatggctttctcctccgtcagtttgtcgagtctgacttgtttttccgtccgtttgttccgcaggtgatcccgctcctgttcattgcggcacttggcgatcaaataatcgagcgtcatcagctctttcttcagcgcgccctcatcctcggcgatcccggcgttttttaatatgcggtagcccattctgagcgactccggaagatgtgcggcatcgtctttcggcaggggctttcccattcctttgatgccggcgaactctccatccttaatggcgcgcttgattttatcttcagccacgatatgggcaatatccatcactgttcacctcttttttcaatagaaccgggtatgattaaacggaaacacaaagcccagtttgtgccatttatatgttttaaagctgtcattcaacagatcaacccccgttgcgacagcgtttttcgccctttttccgatgagccttttccaccttttctatttgctggtttcatggtatattgattacgttcgttttttctatcgttccgtgtaaaccgtgatcggaaaaaaggagtgtaacaatgaaaacatttataaaagaaagaggacttgccttcttcttgatagcggtcgtgttattgtgggtgaaaacatatgtcgcttatattttaaactttaacctcggcatagacaacacgatccagaaaatattgctttttgtgaatccgctgagctccagcttgttctttcttggatttgggcttcttttcaagaaaaaattacagcagacagccattattgtgattcattttttattgtcttttttgctttttgcaaacatcgtctattatagattctttaatgatttcattaccatcccggtcatgatgcaggcaaagacaaacggcggccagctcggagacagcgcgttctcgttaatgagatggacagacgccttctacttcctggataccgtcattttgattattttggcccttaagatgaaaaaaccggctgaaaaaccggcgaagaaatcattcagaatcgttttggcttccgccgtgcttgtgttcctgatcaacctcgccgtcgcggaatccgatcgtcctgagcttttgacacgctcatttgaccgaaactatctggtgaaatacttgggcacgtacaactttacgatttacgatgccgtgcagaatgtgaaatcaaacagccagcgcgcgcttgccgattcaagcgatgtaacggatgtggaaaactatatgaaggccaactatgacgtgccgaacaacgtctacttcggaaaagccgaaggaaaaaacgtcatctacgtctcattagagtctctgcaatcctttatcattgactataaaattaacggcaaggaagtgacgccgtttttaaacaaactggcgcacgataatcaaacattctactttgataactttttccaccaaacgggacaaggtaaaacatctgatgcggaatttatgatggagaactctctgtacccgctttcgcaaggttcggttttcgtcaataaagcgcaaaacacgctgcagtccgttcctgcgatcctaaaaggcaaaaagtacacatctgccgctttccacggaaatacgcagactttctggaaccgtaacgaaatgtacaaagcggaaggcatcgataagtttttcgattccgcttattatgacatgagcgaagaaaacacgaaaaactacggcatgaaagataaaccgtatttcaaagaatccatgccgctcttaaagagcctgccgcagccgttctatacgaagttcattacgctgtccaaccacttcccgttcggaatggataaagaagacacggacttcccggcgggagactttggcgattcagtcgtcaataactacttccagtccgcgaactatctggatgaatcaatcgaacagttctttaatgacctgaaaaaagacggcctgtacgataagtcgattatcgtgatgtacggagaccactacggcatctccgaaaaccataataaagcgatggcgaaagtgctcggcaaagatgagatcactgaatacgacaatgcccagcttcagcgggtgccgctctttatccacgctcccggcgtgaaaggcggccgcaatcataaatttgccggtgaagtcgatgttgcgccgaccgttcttcacctgctcggcgtcgatacgaaagattatctcatgtcaggttcagatatcttatcgaaagagcacagagaagtcattccgttccgtaacggagacttcatctcaccgaactatacgaaagtgtccggcaagtattacgatacgaaaaccggaagacttttagatgattcagaagtcgacaaaaaagaagactctctcgtcaagactgagcttgaaatgtctgataagatcatcaacggcgatctgcttcgtttctatcagccgaaaggctttaagaaagtggacccttcacaattcgattatacgaagcgtgaagattcctcagcagatgatcaaaaagaataaacaaaagccagatcatatcaatgatctggcttttttatgttcagctcccggcggcggccatagagcgcttttgcaggctgtcggaaagaactgaataagcgacgactttctttttctgctgtttgacgacatctacatgatcttcgtagctgtatacaaacaccgtcacatctttttttccttttctcgtcttaatgacaagcggatcggctccgttttgcggatgaagataacgctcttcatcccctgggtatatataatgccgttcgataaacacggcatcgttaaaatcatcaatcacccggcgtttgtcttcgccttccagacgttttccgccgagggaaacggcagcggacgcgtcactgagctttgaatggatttcaaacttgcggagaatccattccaccgctccggtaggaaggcatgtcagcaaaatcttaatcaggcttatgacaacaattgaaacaactgcaatccatgtcaccttacatcacctccatacttgttctacatgaatcttaacatagaagaaaacattgttttttgtacattatgtgaaacttgatatatgttcaaaaaaatccggatcacataggtgatccggatttttcaagtctgcttctggtcgtcacggctgacggcttctctcagctcttccgcgacaaattcgacgttcggcccgataatgacctgcgccgttttattccccgttttgataaccccttttgctcccgcttttttaagcgccgcctcattaatgagagacgtatcctgcacggtcagcctgaggcgggtcgcacagtgatcaatcgtttcgaggttttgcctgccgccgagccccttgagcatggcatgttcttcgacggaaccggccgtatcttcactaagcacttcttcctcttcctcatcatcttcccgtcccggcgttttcaagtttaacgttttgatgagcatatagaatacgacaaaatagatcaccgcataacaaagcccgacaacgagcagcaaaagcggtttttcggcaatgccgtagctgaggagataatcgatcgcccccgccgagaatgaaaaacctgacctgattccgagaacattcacgataaataaagagaacccggttaatatagcatgaaccccgtacaaaagcggtgataaaaacataaatgcaaattcaatcggctctgtaattccggtaataaatgccgtcagcgcgagaccgatcatcattccggccgtcgctttgcgcttacttggcttagccgcggcaatcattgccagacatgcggccggaagcccgaacatcataatcgggaagaatcccgtcatataagttcccgccgtcggatccttcgcaaagaagcgggccagatctcccgtttttccatgaaaatcgccaaactggaaccaaaaaatattattcagcacatgatgaagaccgaatggaatcaaaagccggttaaaaatcccgtaaatcccggcgccgattccgccaagcccgatcatccattccccgaaagacgtaatcaccgactgaatcggcggccacacaaatccgaagatccccgccaaaataatggtaatcagcgccgttacaatcggaacgagccggcgcccgctgaaaaacccgagatattcgggcagcttcgtatccttaaagcgattatacatgtatcccgcaattaaccccgcgataatccctccgaaaacggccatattatttgtcgaattgattgattttacagccgcgtccagcatgatataagaaatggctcccgacagagcggcggccccgttgctgtctttcgaaatcccgatcgcgattccgatcgcgaaaatcagcggcagatgatcaaataccgcggtccccgccgcgtaaatgaacggaatatttaataagtcctctctgccgatggccaaaataataccaacggcgggcagaacggcaatcggaagcataaatgattttccgagtttttgcaaaaattgaagcattttacccatcccccttcttttttcttaaatataccacataagttatctagtgatctataccaattttccttcatttattcacataaggcttgttggttttctatttataatccagttgtggtaagcttgaatcagatgattaaaaatagaaagcgggaatgacaatgattgtaacgaacgatcaagaattagaaggccttaaaaaaatcggcagaatcgtcgcgctggcgcgtgaagaaatgaagaaaaaagccgagcccggcatgagcacgaaagatcttgacctgatcggaaaggctgtgcttgacgagcacggagccgcttccgctccggagaaggaatacgatttcccgggcgtgacatgcatcagcgtaaatgacgaagtcgctcacggcatcccgagcgcctctaaaatcttaaaagccggagatcttgtaaatatcgatatttcggcggagtttggcggtttttattccgatacgggaatttcatttgtactcggagaaggcgatgaacgtctgcaaaagctttgtaactgcgcagcatccgcatttcagaaaggattggatcaggcaaaagcaggcaaacgccaaaaccagatcggcagagccgtctaccatgaagcccgctccaacggatttaccgttattaaaacgctgacgggccacggaatcggcagaaaccttcatgaagcgccgaaccacatcatgaattactacgatccgtttgataacgcgctgtttaaaaacggaaccgtgatcgcgcttgagccgtttatttccacgaaagcggaaacgattgttgaagcgggagacggctggacgtttaaaacgccggataaaagccttgtcgcccaagtggaacacaccatcgtgatcacaaaagacaaaccgattattttaactgcattgtaatgtttcatctcccttccaaacaggtatacaacaactaacccgaaggagggagacgcatgaaaaaagataaagaaaaaatcaaaatcgaaaacgaaatacacgccatgcacggcgtaacgaaacagcagattttagaggatttcgaggaatttaaggcgtaccttcatcagaaaatttccgccggaaaaaaactgggtctggatgacagcaaaatcatcaaaagcgccgccatcctcggggactatctcgccaaacacgaggagccccgcaatgcggaagaaaaactcttacaagaactgtggtacattgcggatgacaatgaaaaacagcatttggcccagcttctcgtcaaacttgccggacactgatacagtgcccggcttttttatgctccgttataagagttgtgctacactggacatatgtctgtgaaaggagccatttttcaacatgtggtttattatcttcgggtttattttctttattgaaagcatcattctcaccgtttacggagtgaagaaaaagaaggggatgctgatttatttcggcgtcgttttcggaatcatgacactcggaacggtgctgttaaaattaaccggccattaagcatgaaaagaccgccctttacatatatatgtaagaaagctttacatctctgaatcgaaagtctcagtttttgcattatcccttttcagcgtctttttatagatgttacaatgccaaaagtttggcaaaagctgaagaaacctccccagcgggagaacggagaaaggagttttctgacatgcattatggcagtaaaggctggtatgtagaagagttaaagaaaaaaggaattacccactatgaaggaagaaagcttcaaagcttcaaaaagtacttccttgccaatctgctggaaacaaaaaaacaagcataacgtaaatcagccgtgctgtcagtgcagcacggctttttttctatacattagtgagcctgtctctttttttaaggaaggactccctccagctttctgacagcgcttcttcccgcagtatttcttcaatcgctgacagattgccggaatcacgatatttcacttcattcgcataccagacggaaatgctttcttttcctctcgacagacgcttgaggacgggacgcggatcgacatatccttcttcaagcaccctgaaataaaagccggtaaatcccgtctgctgtacacggagcaccatatctttgatgccatatttgagcgcgagtttgacgcagggctggcgcggctggcttacttgaacgacggcttcccccagctgaaagacgtctccgatccacacgtcttgttcggccagtcctttgaccgttacattctccccgaacgcggcggcgggaagttttctcgcgagcgttgtttcccaatatgaataatgctcggcgggatacacgcacaccgctttatcggggcctccgtgatgcttcaagtcggcttgcccgtccccgtcaaaatgggttttatacagcatgacgggagaatctgcgggccgctttatgatgccggaattgatttgtctgccggcaaattcatgaattgcgggctttccgagattgatagataagacagaatagtcttgcgtcacttcgttcacatcctttgcgaaatctcatatctttcctttatcatagtaagaaaaaggtggtttttccatgcttcaatatcatatgattgcagacggccgggttcagggcgtaggttttcgctacttcgtccagatggaagccgacagacataaggtagccggctgggtaaaaaaccgtgatgacggccgggtggaaatccttgccgaaggtcctgaagagtcgttaaaacaatttgccgaagcagtcagaaaaggcagccccttctcaaatgtcacaggcgtaaccatcgaagaatcacaccgtctgaaagggtaccgcacttttaccatcagttactgataaggcttgtcctgataataataattcggcttcacaatcgtattgtcatatgatttatggaaaatgtgggtggaagccggcgagatcggcggaatcagccaggtccagtcgcccgtcagctttctgcccgcgtcttgttcctgttcttcaaagcgtttaaattgattcgccgccgtatggtgatcgacaatgctgacaccgtgttttttgtatgaatagagcactgccttattcagttccaccagcacctgatccttccacaggtcggtattcaggctggcggaaatccccatgaccgcagcggcttttttgagcatatcataccgtttttcgtcagcaaggttccttgcgccgatttcggttcccatataccatccgttaaaaggcgccgcgttgtacgacagcccgccgatttcaagcctcatatcggcgataatcggaaccccgtaccatctgagatttaaatcggcaaactcttcaatatccggatgggtgatcggcacttctttcacgagcgtctgaggcaggtcataccagaccggctgcccgtcccctttcatccggaaaagcagcggcagaatatcaaaatcggtccgcttcccgcgccagccgagtttttcgcagacagccgtcagctcatatgatgccggatcaccgactcttccattttcagtctcatatcccgcatagcggatgagctgatgattccagatttccacttgcttctccccattcttctcaggggggaaaatcgtaatcgtcggtttaatttttccgccgttcgtggcgatttcaatatgttcaaataatgcgtcgcgcacctcttctttcgtgttcacaccgcgccggtcaatgacgttcagcgattgccagaacagacgcccgatacagcggttgctgttgcgccacgccattttcgccccgtgttcaagctcttccgccgtatggacgtaacttcccgtccgatctatctcatcttttatcgcgtgcagacgcgcgttgatttgcgattccattccgagttcctgatagcagacatcaataaaatccttcgcctcatcccaaagtatttccgtatgtttcaaaaaactctctccttcaatttacatctgtttcccattgtatcgttttcaggagtgaacacaatggtttttttgtatcatactggaaactgcaaagaaaaaacacctgtgatgttcgcaggtgttttacaaaacggaatgcagtttttcagccagtgtaagcaaatcctcacggtagttttttcccgtcatcggaattccgtgacctgtcaaaagcgcttccggctccagttcggccagtttctgaacggatgcggccgccatctgggtatccgctgtaaaataagcgggcggcccgtgaagctcttgcttttgaatgacaacgtccgcaagcgattcctgttcaacagtgatcacggcatcaccggcaagcagaacgcggtctttatcccggaataatgaaatatggccgggggtgtgaccgggcgtatgcacccatttccattcttcaagaaacggaacggtaccgtctgaaggcagtgcctgaacggacggaatgcggatcgtatggcgcggaaacagcggtgacagctttgcgacaagcccttttttcgcatcgggcctggcaggcggataatccgctttccccgtgacgtacgggagctccttttcatgaatgtaaaccggcacatcccaaagctcaagcagctcttcaatcgcaccgacatgatcaaaatgaccgtgtgtcaaaatgaccgccttcagctgatacccctctttgaatcggcgtttcatttcttctgttatcatctccgccgattgcggcattcccgcgtcaaccagaatgatttcccgcggagctgagggattttcgataaagtaaacattcgcaatctgcacggtcagtccgtaaacgccgtccgccgctttaaaaccggccccgcttctcactgaaaaaagcggcataaacggatcactcatcatggcacctcctctgatgcctttagtgtgcgacgaaccgggtgttttatgttaaaaaatcgtgattgcgccgatgatgagcgcaaaggccgtcatgacgataacggcaagcaccgcccatttcatcgcaaatttctggtgttcatcaatcgtgaccccggcaagcccgactaataaatgcgtcgacggcacgagcgggcttaacatatgaatcggctggccgatgatcgaagcgcgggcgatttccaccttatctacaccgtacgccacggcggtctcggataaaatgggcagcacgccgtaaaaataggcgtcattaggcatcagaaacgtaaagataccgctcgttaaggcaacaatcgccggaataaacccccccatctgttccggaataagcgatacgagggaaatggccatctcatcaaccatcttcgtccccgttaaaattccggtaaacacgcctgcggcaaaaatcatcgaaccgatcgcaagcacattgctcgaatgggctgaaatacgctccctttgatcgttaagcttcggatagttgacaatcagcgcaatacaaaacgcaatgatgaacagcacggttaaattcacttttcctgacactaaaaatcccactaaagaaagcgttaacattaaattgaaccaccacagtttcggccgcttccattcatcttccgcagccgcagccgtttcatttgtatgggacggctgctttaattcgatcaccccgagccgtttcctttccatccttccgagtacataagcgaccacaatcatacacaccattccgctcgcaatgacaggcagcatcggccccgtcagctctgccgggtcaacgccgagcgcactcgccgcacgcggcgtcgcgccgccccatggtatcgtgttcatgatacccatgccgacaccggcgattcccgctaaaataatcggacggattccgagcatgatatacaaaggcagcattgcgcttgtcgtaatcatatacgtcgtcgagccgtctccgtccagtgcgacaagcatggtcaaaacggctgttccgactacaattttgagcggatcgcctttaaccagctttaaaatacgcgacaccatcggatcaaataaaccggtatcaatcataatgccgaaataaagaatcgcaaacataatcatgactgcgatcggcgccacctgttcaataccggagatcatcatctcgccgacccggttaaaagaaaacccggcaaacagcgcaaacacgatcggcgttaatacgagcgccgttaacactgaaagccgttttgtcataatcagcaccataaaaacaagcatcataagaaagcctaagattgctaacacagtatgtcccccttatcatgaatacgcttacattttaaaggcccgatcccctttatccgcctttttgctatcttatgagaattggatattgaagtaaatattttggattttaaagatttttaattttttataaccttttcgttcattttgttcatttataaataaaaagcctcccgcaaatatgcggaaggcttatttttcgctgctcatcatctctttataaaactcggtctgctcttctaaaaagcgttttgcgccgctgctgtttttataaaagctctcccaatcccgttttttcagcatttgcttccactccgcggatgaggtaatctgtttcaaagcctgatcccaataggcgatctcgccttcggtcatgtctttcggccccatgatgcctctccagtgcgcaaagacaaacggcaccccctgctctttccatgtcggcacatcgctgaagccggagagccttttgtccgacgtaacggccgccaatgtgattttccctttccgataggcgtctctcgcttctgaaatggtcattgaggcggcgtctatctcgtggctgataagagcttcaatgacttcattgctgctcccgtattgaaaaaagcggatatcaaacggagaaattccggccatttccgccgctctcgcaaaggagagctggtcatcatttccgaggccgggcgcaaatccgatttttatgccgcccggatgtgctttaatatcgccgagcagccgctttccgctttttatctttgaatccttcggaagagcgacggtctgccactcttttgcgataatggccaaaggcgtaaaatcagctgccttcagccggctttgtcccaaaatttcattgcttaacagcaggcttgaattcatactgatgacatccgtttttcgttcgtttacatatttccagccgctgtctccgcctccgccgggtttatagacgatctttacgggccggcctaatatttgcttccgctctattaccgattgcaacgcttttgccgttacgtcccagcccccttgaggcgccgccgggacgacaatttcaaccggcccttcagctgaacggatgcccgccatctgccgtccgtcaaaagaaaccagcgccgccagcatgacaagaagcactcccaaccgcttcatttctcccatcccttattcatgtgctaaataatatttccgttccggcctgccgataatgccgtactctaattcagcgagcgcttcttcctgagaaacgagaaactcggcgtagcgccgcgccgttgttctggaggcgcccattttttcgcccagttcttcagccgtcatccctttttgggctgctctgagcgcgtttttgattttttgaagtgtaattgaattaatcccggtcggcagatcattgagctgtttttgttctttctgaccgcttccgaaaaacatgtcgataacggactggctcagctccggctgtgagtgcagccattctcttttttcacggtactgcaaaagcacttctgtaaatttatgtgccgacaccggctttatgacatagtgggaaacgcctgacctaagcgcttcctgcagcagtcttgtttcggcagaagccgtaataatgatgatatcaacggaaggaaaacggccgcggatgaggggaagcagatctgtccccagctcatcaggcatataaatatccaaaagcagcagatcaggctgccgtttctcaagcagcgatatggtgtctttggcattgattgctttgccgatgacattgaatccatcaagatgttcgataaatttttcgtgaatttgcgctattcgaaagtcgtcctctgcaatcgcgatgttaatcacaccgattccccctttgacctttctttcggtataaacaccgtaaatacggcaccgccgctcttttgctgcgaaatctctatcgatccctgcaattcactgacggcttctttcagattggctaagccgtatcctctcctcgtcccctttgaagagtagcccttttcaaatatcgtttctgttttttcctgaggcacgccgtctcctgaatccgccacttcgatgacgatatccctgccgatatcggtcataaaaaaggcgacctcttttttctctttttcggcgacggcttcgaaagcgttatcaataagatttccgatgatcgtaatgagctgggatgaacccacatgctccggcagcgattctaaaaagctgttttcatctattgaaagcttcactttcttctcagacgcctttcccatttttcctaatagtatggcctgaacccgctgtgaatgaatgttttgaaagaggatttcgtgctgttcattctggatggcgtactcttcttttatcagttcaatggcttcattatattctcccagctctaacagaccgaggatcgcgtaaagcttattcgagaattcatgcgtttgcgcccggagatcctccgagtattttttcatttcagtcagcttgttaatgagtttcttgagctccgttttttcgcggaagctgatcaccgctccgtatacttgtccggtctgcttcatttctttcacgtttaagataaacactttatctccggcacgcacctccacgttcggcggtaattctccccctgccaaaaccggcataagatttgcgcccggcatgatttcttttatatgccttccgatcatcggtgccggaagattcagcatatcagccgcagataaattcatcatggttaccgcgccttctttgtttacggcgataatcccttctttaatcgcaaggagcatcgcattgcgctccctgtacagtgctgcaatttcatgcggttcaaggccgagtgtatctttacgaatgctttttgcgagcgccgccgctcccccgatgccgataagaaacaccaaacatgcaaaatagcctaaatgccgcagatgcgctttcatatctttttctatctcatcttgtaaaaactcgactgtcaccgttccgacgacttcgttatgatttttttcctccaaaataaccggggcgctcccccggacagccttcattccgtcggaaaccggtgacccgccgaacatgacggttttattttgcagattttgattttctttcggaatactgcttcgggccgaatgaaatgcaacatgccctttttgatcagtgatgtagacggcgtgcgcgcctgcctgttctttcatttgttcaatgacatctaactttgtaaaagcctcttgatccgcaagccggaacgcctcttttacaggaggcatgtatgaaatggtttttgccgtttgcaccgccagctgttcagcctgcttctggccttcctttaattgctgaaaggcaaatataaccgtgagcgttccgatgacaagtattaataaagccgtgattaatccggcgattttcatttgcagagagacataaaaccgcttcgcttccaacacagcaccagccgtcctttcctcctaaaatcataccattttttaaatcttcatttctcatttttgagaattttcgtgatctttttctcttgtggcttaccaaaaaggtgatgatagatatatatttacttttacacaattgatataacacataaaaaagactgaccgaagtcagtctggcaatctatcaggaaatcgtaactcccgcgcttgcatatcccgccactgtattaataagcgaaaggcctgtcgcagtggcggagaataccattaacagccgggtttgaggagttaccgcaatgttcagccctgtcgtgattccgttgctgatgctgccgattgacaatacgccggtgaggggaggagctaaagtgacggatgctccgggaatcggcgtgaacgtattattcggcactgtggaactgtataattgtgcggttatcgtaacagtcgagccgacaagcgacaatgctgcggttgtactgaaataggcggcaattgatgtaatggttccgcttctcggaacagaaaaagcaaagttcagcagagtccctccggctcctgtaagatcaattgcgcctccccctccgacattgacgcccgtcacagaattgccgaacccgacaaggctcaccgttccgattaatccgccggcaatggtcgtcacggcagttgggagacctgaagcatagggaatgatcgcgcctgctccggtggctccggttgctccagtcgaacctgttacccctgtggctcccgttactcccgtggctcccgttactccggtggctccagtatctccggttactcccgttaccccggtggctccggttaccccggttactcctgttgcgccggttaccccagttgctcctgttactcctgttgccccggtcgctccggttactcctgttgctccagtatctccggttactcccgtggctcccgttactcctgttgctccagttgcgccggttactcccgttactcccgttactcccgttactcccgttactcccgttaccccggtggctccggttgccccggtggcgccggtgagcccggttactcccgttatcccggttactcctgttgccccggtggctcccgttatcccagctgcgccggttactccggttactcccgttactccagtggctcccgttgccccagttgcacctgttactccggttgctcccgttactccagtggctcccgttgccccagtcgatccagtatctccggttgctcccgttaccccggttgctccggtggctcctgttactccggtgagcccggttgctccggttactccggtcgctcccattattccagttgcgccggttactccggtcgctcccgttatcccagttgcgcctgttactccggttgttcccgttaccccagttgcacctgttactccggtcgctccggttaccccggttgcgccggttactccggtcgctccggttaccccggttgcgccggttattccagtcgagcctgttactccggttgagcctgttactcccgttgctcccgttaccccagttgctcccgttaccccagttgcccccgttaccccggtggcgccggttamtcccgttgctcccgttaccccagttgctcccgttatcccagttgcaccggttactcccgttgctcccgttaccccagttgcgccggttgctccggttaatcccattgctcccgttatcccagttgcgccggttactccggttgctcctaataccccagttgcccccgttaccccggtggcgccggtgatcccagttgcgccggttactccggttgttcccgttaccccagttgcacctgttactccggttactccggttgctccagtatccccggttacccccgttactccggttgggcctgttactccggtggcgcctgttaccccggtggcgcctgttaccccagtatccccggttacaccggtagcacctgttactccggtgagcccggttgctcctgttaaccctgttgctcccgttacaccagtggctcctgttattccggtcgctccggttactcccgttaccccggtggccccggtaatcccggttgctccagttactccagtatccccggttacaccggtagcacctgttactccggttgctcccgttaccccggtcgatccggttactccggttactccggtcgctcccgttatcccagttgcgccggttactccggtcgctcccattattccagttgcgccggttactccggtcgctcccgttatcccagttgcgccggttactccggtcgctcccgttaccccagttgcacctgttactccggtcgctccggttactccagtggcgcctgttactcccgttaccccggtggcgccggttaatcccgttgctcccgttaccccagttgcccccgttaccccggtggcaccggttattccagtcgcgccggttgctccggtcgagcctgttactcccgttgctcccgttactcccgtggcgccggttgctccagtcgcgccgggatctccagtgacgccggttaccccagtcgctccggtattcccggtcgagcccgttgctccagtgaatcccgttgctccagtaaaccccgttgctccggtcagccccgttgctccggtgaatcctcttacatgaaaatgatttggatgacagcatggacaccatctttcatgacagcaagaagtcttgcaacagaattcttcacagcagtgggcccgattttgataactgcgcctttgatttcttcttttatgttgaaaatgacagcaacactcattactattccggcagtcgtaatcccaagagtcgtatctgttataccaagtatctccttttctcattacaccacctctatttgcataatatttccacaagaaaaaaaggtgtggcaaaatcccacttctattgggcaaatttttaaatgttctttaaggctgcatcatgcagcatttacagaaaaaaagacctaactttgcataagtcaggtctttcatctttaaaatatcagactgctgttgtcattaggttgtcgggaaacgaatgctgttaaaatcgatattgagagctgtcgctgttgttatattattcgcagttatgaaaataactctcagctggtacgtatttgttcctgcggtcggtgctgtatccactgttgtatcagcaattgaaaaactatccgtagctgcgagagtactggttcgcgacagagttcttgtatgaatttgcactgctcccctatataatctcacttcataaacaaagtttgaattggctgcagttgttaacgcgacactgagtgcataatcaagctttacattctgcaaagcattaaccgggactgccagcgtagcaacgggaacttctgtatttaacggcggataaacagtgagcggcccgttggttcttgtgaagagcaaggttggtgtactgcctgtggcgccggttgggcctgttactcctgtggctccggttgggccagttgctccggttggccctgttgcgccggtcgatcctgttgcgccggtgagcccggttgctcctgttactccagttactcccgttgctccagttactcccgttgctccagttactcccgttgctcccgttgctcccgttgctccagttactcccgttgctccagttactcccgttgctccagttactcccgttgctccagttactcccgttgctccagttactcccgttgctccagtcaagccggttgggcccgttattccggttactccggtcgatccggttgagcctgttggccctgttgcaccggttggtccggtcgctccagttgaaccggtcgctccggtggctccggtgagcccggttgctcccgttactcctgtggctcctgttgctccagttagtcctgttacaccagttattcccgttactccagttggaccagttggaccagttggaccagttgctccggtttctcctgttacccctgttgcgccagtcgctccggttatccccgttgacccagtcactccagttgatcctgttgatcccgtcactcctgtggctccggttagtcctgttacaccagttattcccgttacaccagttggaccagttgctccggttgaacctgttactcctgttgccccagtcactccagttgctccggttgatcccgttactccggtggctccagtcacacccgttgaaccggttgggcctgtcgatcccgttgaaccggtttctcctgttaagccggttgggcctgtcgcgcctgttattccagttagcccggttacaccagttgcgcctgttgctccggttgcgcccgttattccggtcgctcctgttgcacctgttatacccgttgctccagtccctccagttgctccggtttctccagtcggtcctgttgagcccgttactcccgttactcccgttgccccagttactcctgttgagcccgtggttccggtttcaccggttgaaccagttgaccctgttggacctgttgctccggttgagcccgtggttccggtttcaccggttgaaccagttgaccctgttggacctgttggacctgttactccagttgatcccgttgagccagtcgcgccggtttctccggttactccggttggaccggtctctccagttgggccggtttctccggttactccggttggaccggtctctccagttgggccgatttctccagttacccccgttgcccctgttgcgcctgttgatcctgtcgcccctgttgcgccggttgatcccgttgctcctgttgggccggtcgagccagtttctcccgttgccccagtcattccagttgccccagtcactccagttgcaccggtttctccagtagctccggtatccccggtcgagccagtttctccggttgaaccagtcactccagtgactccggttgctcctgtcggtcctgttgctccagtcgagccagtttctcccgttgccccagtcattccagttgccccagtcactccagttgcaccggtttctccagtagctccggtatcccctgtcgagccagtttctccggttgaaccagtcactccagtgactccggttgctcctgtcggtcctgttgctcctgtcgagccagtttctcccgttgccccagtcactccagttgcaccggtttctccagtagccccggtatcccctgtcgagccagtttctcccgttacaccagtcactccagtgactccggttgctcctgtcggtcctgttgctcctgtcgagccagtttctcccgttgccccagttgcacctgttgatccggttgctcccgttgagccggttgggccggtcgatcccgttacaccagttgggccggtttctccggttgaacctgttactccagttgatcccgttacaccagttatccccgttacaccagttggacccgttgctccggttgagccggtttctcccgttacgccggttgtgccggttgtgccggttgtgcctgtcgatcccgttgctccggtttctcctgtcgccccagtcacacccgttgcgccagtcacacccgttggaccggttggccctgttactcctgttgggccggttgaaccggttgtgcctgtcgatcccgttgggcctgttattccggttgtaccggttgcgccagtcgctccagttgcaccgatttctcctgttgagccagtaacccctgttgggccagtcacacctgttgggcccgtcgcgcctgttattccagttagcccggttacaccagttgcgcctgttgctccggttgttcccgttattccggtcgctcctgttgcaccggttgagcccgtgaccccagttgggccggttgatcctgttggacccgtgattccggttggaccggtttctccagtcggtcctgttgctccagtcggccctgttgctccagtcgagccggttgttcccgttactcctgctgggccggtttctccagtagctccggtttctccggttgcgccagtaactccagttggaacggttgtgcctgttggcccggttggacctgttattccggttgctcccgttgaaccagttgagccggtttctcctgtttctccggttggaccggttggaccagttacaccagttgagccggtttctccggttggacccgttactcccgttgcaccagtttctccggttgagcccgtgaccccagttgggcctgttgcgccggtcgctccggttgagcccgtggttccggtttctcctgttggccctgttgcgccggttggacctgtcgatcctgttgcaccggttgagccagttgggccggtcgatcccgttgcacctgttgctccggttgaaccagttactccggttgggccgatctctcccgttgggccgatttctccagttacacccgttgccccagttgggccggtttctccgattgaacctgttgctccggttggaccggtctctcccgtcgggccgatttctccagttacacccgttgcccctgttgggccagttgatcccgttactcctgttgggccggtttctccagtagctccggtatccccggtcgagccagtttctccggttgcaccggttgaacctgttgctccggttgagccagtcgctcctgttacaccggttgggccggttgatcctgttggacccgtgattccggttgggcctgttattcctgttgctccggtttctcctgttgagccagtcgcgccggttataccagttgggcctgttgagcccgtggttccggtttctcctgttggccctgttgcgccggttgggccagtttctcccgttgcaccggttacacctgttgagcccgttacaccagttggacccgttactccggttgagccggtttctcccgttgagccagttgagccagtcgcgccggttgaacctgttactcctgtggatcccgttactcctgctgggccggtttctcctgttgggccagttactcccgttactccggttactcctcttgctcccgttgctcccgttgctccggtcgatccggttgggcctgttattcctgttgctccggtttctccggtcgccccagttactcccgttgctccagtcacacccgttgcaccggttgggcctgttactcctgttactccagttgatcccgttgcgccagtcgctccggttgaaccggttacaccagttgcgcctgttgagccggttgctccagttaccccagttgcgcctgttgagccggttgctccagttaccccagttgcgcctgttgagccggttgctccagttacccccgttgatcctgttgagcccgttgcaccagtcgttccggttactccggttccacctgttgcgcctgttgagccggttattccagttataccagttgatcccgttggacctgtttccccagttacacctgttgggccggttgggccggtttctccagttatacctgtcgccccagtttcccctgttattccggttgtacctgtcactcccgttggtccagtctcccccgttggaccggtcgagcctgttattccggtcgctcctgttgttcccgttctcccggttacacccgtgaccccagtcgatcctgtcgatcccgttactcctgctgggccggttactcccgtcgcaccggtttctcctgttgctccagtcactccggttgagccagtagctccggtatccccggtcgagccagttactccggttgccccagtcactccagttgcacctgttgatcccgttactccggtttctcctgtcgatcctgttgctcctgttattccggttgagcctgttgatcccgttggaccggcctctcccgttgggccggttgatccggttacacccgttaccccagtcgctcctgttatccccgtcgcaccagttgagccggttgcgcctgtcggtccggttgttcccgttccccctgttattcctgttgacccgcttactccggttggaccagttacaccagtcgctcctgttggaccggtcaagccggttgggcccgttgcaccagttactccggtcgctcctcttactccagtcactccggttgagcccgtagttccggttgctcccgttgcaccagttactccggtcgctcctcttgctccagttactccggttgagccagtggttccggttgctcctcttgctcctgttacaccagtcgagccggtagctccagttactcccgtcgcccctgttactcctgtcggaccagtcattccggttgggccggttacacccgttgatcctgtcgacccgattgagccggttactcctgtgggacctgttactccagttgcccctgttactccggttgatccagtcattccagtcgacccagtcgctcctcttgctccagtcactccggttgagcccgtggttccggttgctcctcttgctcctgttacaccagtcgagccggtagctccagttactccggttgctccggtcgctcctcttgctccggtcactcctgtggggcccgtcactcctgtgggacctgtaattcccgttacgccaggttcacccccggtttgcgccaatgaaacatcgtctattaaaaccgttccggaagaaactttacttactacaatgacggcaaaggccgcgccagaaggcacagtacttgttttatagatttcagaccatgtgtgaaagagcacgttcggcaaatttccgggtgtaatattttcttgaatggcactgatttgttcacctgctgcgctgacatatatgatctggagagtgacttggggacttggctcatttccgagcgttgcgagtgatatgaatagagtcactgacttggctgtaattggaacgatttgactgaggtaagcatatggctgagctccaataaattgcgcagaatatctccctgaatgtgcaaacaaactgttaatctgggtatttgccgaactccaccccgctaatgtgccggtttcaaagcttccgtttataatcggattattcattcaatctttttccctctccttcccgttgttgaccgtcttacttattaagacagcatattaatacgggctgtgttttgacaatctaaataaaaaaggtgatttcttttcatcaccttaatccgatccttgaatggggaatcccgtcgcaatgagggagcggtttgccgctgcgacttgtgttacgtaattcgaagaaaggacggataaatagagctgatacgcggctgtttcatccgccttcatttcgtcgatgtacgtaaaaggaattcctatgatttgcccgcctgaagaaaagaggttctgctcttgtctctgtgtttgtatcgatacgccatttctttgcagctcgagagctaagaccaatgagaaatgagacgcgagcggatctaattccacatttacttgtatgacggcatccgttttcaccaattgatctgtcggcgcggctatcactgtgcttaacacgtttatcggtgttccttctaacggaatcatcatctggtctgctgtattttgaaaagctacagccggaaccgctcccgggggcccctcaggccccgggggaccgggcggacccgcctccccttgcggaccgcgggcgccggcgggtcctcttttgccttcgggacctcgcagcccgggtacgcacaaggcagatcgattttcatctgaagacggaaaccgtttttccgtccctgtttccggactttcaagttcacatggtaattgttcataccggtgtttcatatgtctgctcatatatttgtaaggtttctgtttcaatatcatgtattgattacggccgctgctcatattatcaccccggtcatattctattcgcactggagtcatcatgtgcaggcccttccccttccttacagaaataaaaaaaggcagacctgagtctgcctttttcttctaccataaccctaatactttccaccataatccgccgatcacaagccatgtcacaatatggacgattgacaggataaagccgatggaccaccatttgctttgcgatatataacccgctccgaaaaagaccggagccgctcctgagccgtaatgcgtcgtcgaaccgaaaaggttgctgaaaaacgccaggctgagcgccgccaacagcggcggagcgcctgccgccacgatgacggcgagaaatgccgcatacatggcgctgatatgcgcggttgcgctcgcaaagaagtaatgcgtgtaataatacacgacaatcagaatcataaatgccacaatccatgaaaaaccggaaacagaagatttcatcatattgctgaaccaagacaccatgccgagctcattcaggaaattcgccagcatcacaagcgccgcgaaccaagtcagcgtatcccatgcaccttgttcctttttgatgtcctcccatgttaatacctgtgacaaaagcaaaacggataatccgatcagggccgtcgtcgttgcgtcaatatttaagcttcctccgaaaatccacagcgcaagcaccaataaaaagacgatgaccatggagagttcggattttttaaacggacccatttctttcaatttttccgttgcgattttagccgcatccggtgtttctttaatttccggcggatacagcttataaatgaccagcggcgtaatgattaagctcgccaatcccggtacaatggctgcgattgcccagcttgtccatgtgatgtccacccctgcgacatcgtgggccagcttggcgatcagcgggttcgccgccattgccgtcaaaaacatcgcagacgtaatcaagtttccttgaaaaccggtttttaataagaaagcgccgattttccgctctgttccgtctgccggcgttgatccgaaagtttcggataatgatctgataataggaaaaataatgccgcccgcccgtgccgtgttgctcggaatggcaggtgataaaattaaatcactgaaaagcagtgaataagaaaggccgagtgttttcttcccgaaccgttgtacgaatacgtaagaaatcctggcgccgagcccggttttgataaatccccgggaaataaaaaaggcgatgacaatcagccagattgtcttgtttccaaatccgcttaacgtattttcaatagatagcgttcccgttaacgcggtgactgccaatgcaaaaattgcaattgcgcccattggcaagggcttggagataaagccgataattgttgcgacaaaaatagcgaacaaatgccatgctttaggttcaagtccggacggcgcgggaataaaccaaatgattaatcccacagcaacagtaataagcaaaggaatgatttttactgcctgctgtttttttgcgtctttttctgaagccattacaggtctcctcctattttgttgtcttccatcccctatcccattttactacttaactaagttaataaacgtttttgttaattaaaaaacacaaaggaatattttcctttgtgtttcttgtttattattttaatatgcccgccccggctttagatataacatctgattttacatttgatgatgagccgatggaaccgtgcaatgacggtgtccagccgacggactgacttaatccgttggcggctgacgcgttaattgaggcgccgtttaaaagagtgccgtcttcatgaagcgcttttccgccgctgaagacgctgatgactttatcagcagccagccccggcacttcaaagacattattctgggcatatatttttgacgcgcggcccgcgccccacgcatagctgaacgggtatgcggcgcttttagagcctgcgtaaaaattattataaatatgaacctgcccgaaccggacccgcggcgcgcgctggacaatgttctggtaatagttatggtgaatggtcaccttcagttttccttcatccgacgtcttgctgtcgctgttaccgatgacggagcctttgtcatggtcatgatatttattataggacaatgtaatataattcgccccgttggctatatccgtctggccgtcatggtgctgatattttctcccgtaatagtagggaaaactgctgtcgggattcgatccgtcattaaaggtgcaatgatcgatccagatgtgcgtcgcgccgttaatggtgatattgtcatattccgagttccagttgccgctgctgccgtccgtcgggtcccattgcggaaaatagtcgtaagcgtcttgaaattcaatgttgcggatgatgacattgtcgacgccgttcttaatattaaaattcccgcctgtcactttggcatttgaacccgagccgatgatcgtcgtatttgaaggaatgtcaaccacgacccgtgccttctgatttttttgcgatcgctgtctggcgtcttcctgggtgcctgacggcgctttttttccccatttgtccgggtcgtacgccttcagataggcgttcggatcatatgccggatctttataatcatgaaagccgagcgttttattgcggtcgtccgtattcatattgattgtgccttgtatgtaaataatcttcggcgtgctgttggcgcttccccctaatgcagaaacgagctgctgtctgtttgatacggtgtatacattcgatgaagaggctttcgcgccgccggttgtcccgccggaagcggctccccagccgtcatttgttcctaacgtctgccgtcccagatcagcggcatagacgtccgcagggatcatacataaacaaaccgccagcataaataacatttttttcatgaattgtgctcctcctgattctttgttccaatttattacaattgaattgtatcaaatcagttgagaaacagcaccgaaaatgtacagaatgtgcctttcggttttattgcggaaaccgcaaaaaaatcccaagggaccgaaaaccccttgggatctgttcagcttacgcccatgatttcactttttcgttatccgtgacaaacagaagaacttttccttcatctaagcgcttttcaaattgtgatgcttcctcttccgaaaagccgatttcgtgaattttgttgcggagctcgtcgccttttttattaaacatattgccgactgcgtgtttaatgcccgtttctttcgctccgatggtattgacatcagtattatcggccaggcggtccgttctgtcgtcatcatgagaaagcacatatacgtcttcttttgcgacacccaattgctgaagctcttttacgtcctgcatcagtttttgatcatttgtatattctcttactaccggtttcattgataagtcctcccttttgtttttgtatattggatgtttacccgatcaatcaaggatcaaacaaaagaaagagagttcagtgggaaaacgggcagattgtcggtggatattttctggcgggacatgttacagtagaaaaagcaacttttatcagaaaaataaaaatcttcttgagccgattaagcagggaggtggttcctattcattacttttcaccggaacagcgatttaacgcttgggttgtcagtgatttagtgaagcaggtattccgccggcatacccgctgcccggatggaataaaagagcttacggcctttgctgaagatacttttcatattaatatcgatttcgttttctctatcattatcaatatcggtgatatcgaatccgttctgccggcagaaattgaaaataggctgggttcttatctgaccgcgcttcagcccgtgattaccgctgacatgcttcattcttcaaaaacaaatgcctatgaatatttggaacatgagaaaaacaccgatgtgtatcggttattctattcaatatgcatataaggaaagaagggccctggcccttctttttttatggccgctgacggtttgattttgtaattgggaaatggttcgtgttacatttggaacaaccacttatcttgaaggaggattcagtatgccgaatcatcagcagcaaattcaattggcaagacgccccaaaggcgttcccgcccatgacgatttccgctttgaaacgattgccgtgcccgaaccgaaagacggcgaagtgcttgtgaaaacgagttatgtgtccgttgatccgtacatgcgcggacggatgcaggatacaaaatcatatgtagagccgttcgctttagatgaagccataacaggcggagtgattgccgaggttctgacagacggcgataagctgaaaaaaggagatgttgtgatcggaaatctcgcgtggcaggaatattcagccgtcaacgagtccgccctccgcaagttggatacggatatcgcacccgcccaggcgtatctcggcattttagggatgaccggactgaccgcttacttcgggctgctcgatatcggccgtccgaaaaaaggcgaaaccgtcgtcgtttcaggcgcggcgggcgccgtcggctcaacagtcggacagattgccaaaatcaaaggggcgcgggttgtcggcatcgccggatctgatgaaaaaatcgcgtatttgaaagaggagcttcaatttgatgaagccattaattacaaaacggcggatgatattcaaaaagcgctggaacaggcatgtcctgacggcgtcgatgtctattttgacaatgtcggcggaccgatttcagatgcggtgataaacctgctgaatgaattcgcccgcattccggtatgcggagcgatctcatcgtacaataccgaaagtgaagaagaagacatgggcccccgcgtccagccgaagctgatcaaaacaaaagcgctgatgcagggattcatcgtcagtgattatgctgatcgcttttccgaaggtgcgaaacaattggccgaatggcttaaggatggaaagcttcattatgaagaaacgattacggaaggattcagcaatattcctgacgcgttcctcggtctgtttaaaggagaaaacaaaggcaaacagatcatcaaagtcagtgatctaagttaacatgatgatgaaaaaaggagggctttgtcccctccttttctttttttttcggatcagccgcgaagaatcaaagtaagaaagccgtcttcatcaggctccgtatcttccaaagtgaatcctgctgcttgaaagcaggctaaactgatttgattgtctttttcgatgcttgccgcccattcccgcacgctggtaaacccaggatcagtcagcagttttttcaagatctgttttccgtacccttgaagctggtacaaaggattgacgatcaatccgatatacgcccgctcctccgcaaactctatagagaccatgcctgtcggacactccccgtcgtatgccataatgacagtatcgtcttcatctttactcaatcgtgcataccacgcgtctaatggcagcatcgcatccattctccgtctgatattatcgttcttaaaccagtgttcaagtattttcagctcacgttccttcaatatttgaaatctgtctattgaaaccatcttcccgccccccgcctgaaccttttctattattttacaacaaaaaaaacgaagggcttcccgccctccgtttcttatttctcagataattttccgcctgaataaacggcctctttcagctcaattccgagtgatttggccatttttttcaatttggattcttccatcggcgtgacaaggctgagtacggttccttctttaccggcccgccccgtccggcctgatctgtgaatgtacccgtcttcattcgggatgtccgcgtgaatgacgtacggaagatcatcgatatcgagtccgcgcgccgcaatgtcagtcgccagaagcagcggaaattctccccgttcaaacgctgataatatctttgcccgctccatttttttcgcttctccgtgcaggatgccgagatccacatggtgataggcgagtttttccgcatagacgcttaaatttccgatatctctgacgaacacgagcgcctgcatgccgttcagccgtgacagcttttgcaatagcttcactttatcccgctgatcgcagacgagatattgatgcgtgacgcgcgctttttccgccgtattccgctccactttcaaaacggccggttcgtgtgcgatggtattcagcacctgttctgtttccggctgcagcgtagcggaaaagcttaaaagctgtcggtctttcagcgtcgttttaatgatttttttcatcgtttcgcggtgttcctgtgtcacgagctgatccgcttcatcaagaacgatcgtcttgacttcatgcattttcagctttttcgcctgaatcaattcgagcaccctgcccggtgtgcccgcaatgatatgcggtttatttttgagcttttccacctgctttttcacgtttgctccgccgatcaaagacaaagcgcgaagatcagagccttttatccactcctgaatcacttgaaaaatctgcatcacaagttcgcgggacggtgctaaaatgatcacttgcggatgtttctgttccgggttgatccgctccagaaccggaagcgtgtacgccaatgtttttcccgttcccgtcggggattcggcgatgacgtctttcccttccataatcacctgagcggctttttcctgaataacggtcggctcctgaaaacctgacgcctcccagttttcggcgataaatggttgtgtatgctgtaaaaatggccatgtttgggtcatgtcgttctcctcaattcttaaaatctactccatagtatctcaaatgcacgcgccaaacgcaattttctttttccttccaagccttttaacaaacggtctcctcctttataatcataaatgagaaagacacaagataaaaaatgcgtgtctgataacgatagaggtgtaatgatgagtattttatccgtaaaagatttaagccacggctttggtgaccgtgcgctttttaacaatgtatcgttccgtcttttaaaaggggagcacgtcggcttaatcggagcaaacggcgaaggcaaatcaacgtttatgaatattattaccggaaagcttgagcctgatgagggtaaagttgaatgggcgaaaaacgtgcgcgtcggctacctcgatcagcataccgtgcttgaaaaaggaaaaacgatccgcgacgtgctgaaagatgcgttccattacttatttgcgatggaagaggaaatgaatgaaatttacaacaaaatgggcgaagcggaccctgatgagcttgagcagctgcttgaagatgtcggtgtcattcaagacgccctgacaaacaatgacttctacgtgattgacagcaaagttgaagaaatcgcccgcggcctcggcctgcaggatgtcggacttgaccgcgacgtcactgatttaagcggcggacagcggacgaaagtgctgctcgccaagctgcttttggaaaaaccggaaattcttctgttggacgaaccgaccaactaccttgatgagcagcatattgaatggctgaaacgctatttgcaggaatatgaaaatgcgttcatcttaatttctcacgacattccgtttttaaacagcgtgatcaatttgatttatcatgtggaaaatcaggagctgactcgttatgtcggcgactaccatcagtttatggaagtctacgaagtgaaaaaacagcagctcgaagccgcctataaaaaacagcagcaggaagtggctgagctgaaagatttcgtcgcccgtaacaaagcgcgggtcagcacgagaaatatggcgatgtcccgccagaaaaagcttgataagatggatatgatcgaactggcggccgaaaaaccgaaaccggaattccatttcaagcctgcgagaacgtcaggcaagctcatttttgaaacgaaggacttagtcatcggctacgatactccgctgtcacgcccgctcaatctcagaatggagcgcggacagaaagtcgccctgtacggcgcaaacggcatcgggaagacgacgctgttaaagagcctgctcggtgaaatccagccgctggaaggcacggtggaacggggcgagcatcaatacacgggctatttcgagcaggaagtgaaagaaaccaataacaatacgtgcatcgaagaagtgtggagcgaatttccttcctttacccagtatgaaatccgcgccgccctcgccaaatgcggcctgacgaccaaacacattgaaagccgcgtctccgttctcagcggaggagaaaaagcgaaggtcagactgtgcaagctgatcaattcagaaacaaacctgctcgtgcttgacgaaccgacaaaccacctggatgtcgatgcgaaagaagagctgaaacgcgcgctgaaagaatacaaaggctccattctgctgatttcccacgaacccgagttctacatggatatcgcgacggaaacatggaattgtgaatcttggacgacgaaagtgctgtaaacacaaaaaggaactcccgcctgtgcggaagttccttttttttcttaatgtccggcttttattccggcgagatgtttgcgtcccatgagaaggacaagcatgccgacaaaaacgacgatcccgcctactgtatatggagtgcttgcggtgaagtgttctgacagcattcccgcaatccacggagcgagcgcaccgccgataaaacggactgagctgtaggctgaagacgcgattgaacgttcaaccggcgcagaacccatcacagcggttgtcatgatcgtattcaccataccgagaacagcaccggcgacaacgatacatgtaatgatcaacgtctgatggtcagtccagatccccatgacgatgagaatgaccgcaaacgcgataaagagaacgacgagcgaacccactgttcccagcgctttgtgcacgagcggcgccgtaaagactgacgtaattgccagcaataacccccagccgaagaagacatatccaaggccgtgttcatctaaatccagcacgaacggagaataagcaagcaaaataaaaaatccaaagttgtataagaatgcagatactgccattgttaaaaggcctttatatttgagcgccttcatcgcatcaaacacaccgacgcgtttcgccggtttcggcagcttcggcagcatgagtgaaatcgcgcaaagcgctatgaacataaggacagatactccgaagaacggagcgcgccatgagatgctgccaagctctccgccggcaagcggcccgacggaaatccccaagccgagcgcagcctcatacagaataatggctttggcgctgccgccgactgataccccgacaatgacggcaagcgcggttgaaataaagagagcattcccaagcccccagccgccgcggtagccgacaagctgagcgattgaacttgagcttccgccgagggcggcaaacacgatgatgaaaataagtccgagaagcagcgtccatttcgcgccgatccggctggaaatcgcgccggagaaaaacatcataaaaccggtaacgagtaaataacttgtaaataacagagatacttcactaggtgaagcatgtaattgtgcggcaatcgccggaagaatcggatcgacaagaccgattcccataaaggaaataacacaggcaaacgcaaccgcccaaacggctttcggctggctgaataagcctgttttctgttgtgatgatgtatccatttgaccagacctcctgtttcatccattaaaagaaacgctatatccatagcgtttacagcaaaatcattcgattgattgaatggcgcggtcagctttttctttcattccgttaaggcgcgttttaaaatgctgaaatgtgctgatcttctcatcaatcatctcaagctggtggttcaaagcgtgctgaatctcttccagcttttctttccgttccttcggatccagtgacaacaagtacccctctttgtttaattccagctgacggctcatctccataaactgctgaagctcctgaagggaaaaaccgagcacttcttttgtgctggtgactttttcgagctcctccatatcatcttcagagtaaagccggacgccgccttctgtccgtttaggagcaggaatcaaaccaatctcctcgtaaaaacgaatggttcgttttgtcaatccgcttcgcttggcaacttgatcaatcttcatccattccaaggtgaatccccctcttgtcgtatctgtttctattatacaccatttgaaccttaacgtaaacgttaactttttatgcctgataaactttgcttggacaaaacgtttgtctttaaagcgccgggagacatctgtgtaagataaaaaaagccggtatgacccgccagctttctcgggggccgtaccggcttttcttaattctcaagttcttcaatcatcagtgacaattcggtccagcgctccatcgccgcttcaagctcttcagccgtttttgcctgttcggccatcagttcttgaatctttccgaaatcacttcccgcttcagcgatttccgcttccagacgctgatgcttttcttcaaggccggcgattttgtcttcgatgccgtcccattcgatctgatccttatatgaaagctttttgcgctttttcttcggctcttcctccgcctttttctcttcggccggctgttttaccgccgtcttcttcgcttttgcgtattccatgtattcactgtacgaaccttggaaacgggaaatgacgccttgtccttcaaatacgatcaggcggtcaatgacgcggtcaaggaaatagcggtcatgggatacggtgatgacgacgccggggaactgttcgatataatcttcgagcacgcttaatgtttccgtgtccagatcattggtcggctcatctaaaaacagcacattcggttcctgcatcagtacattcagcaagtacagacggcgcttttccccgcccgacagctttctgatatatgtctgctgcatcggacgcgggaacagaaaacgctcaagcatttgttccgcggtgatgacatcgccttccgccgttttgacgatttcagccgtctcttttatatattcaatgactttcatatcaccgttcatttcgctgtggtcctgggtgtagtagccgatccggaccgtctgcccgatggtgatactgccgctgtcaggctgaattctgccggcgaggctgtttaaaagtgtcgttttcccgattccgttcggcccgatgatgccgattcgttcccccgggatgacaagctcattaaaccggctgatcagcgcttggccgttataggtaatggcgacgttatcggcttcgatcacctgttttccgagacggtgggaaccgatcgcgaaatcgagtgatccggagactgccggccctttttgctctttgagcgcctccgctctgtccactctcgctttttgtttcgtcgagcgcgctttcgcccctcttctgagccacgccaattcgcggcgcaggaggttttgacgttttgtttctttctgctccgccagcgcttcccgttcggcccgtttttccaggaatacttcatagtttcctttatacgtataaaggctgcctctctcaagctcgtaaattctgttcgtcaccctgttcagaaaatatctgtcgtgcgtgacaagcataacagcgcccggatattgcgataagtagccttccagccattcaatcgtttcattgtccaagtggtttgtcggttcatccaaaatgagcaggtcagccggctggatgacgtttttcgcaatcgcgacgcgctttctctggccgccggacagctcgctgacatccttcatcagatcggtgacgccaagtttggttaaaaccgttttggctaacgtattcgcctcccacgcatcattcgcgtccattcgggcctgcgcatcaagcagctgtttctggcgctggtcattttccggttcttcattcagcgcctgaagcgctttttcgtattctctcatcgttctcatgacggctgatccgccggaataaatatgctcaagtacggtttgtccggccggaagctcagggtcctgatgcaaaaactcaatatgcacgtttcctgaggccgtaatctcgccttcctccgttgattcaaggccggcaatggttttcagaagcgtagacttccccgttccgttcgggccgattaaaccgattctttcattctcttcaatatgaaaggagatatggtcgaataatgtcttatctccgtatgttttataaaggttttccgcttttatgatgctcatggtccctatcaatcctcacgtaagttcatgtgttcattttaaatcaggcgctggaataaaactagtaaaaggacagacaaatttcttggaagagatcattttgtccgaagaatgtttccgcctctccttttatacactggaggtgaagaggtgatgacatgatcagcgtcagtttgtgcgttatcgtgaaaaatgaagaggaagtgcttgcgggctgtcttgattccgtcaaagacattgcggatgaaattgtgattgctgatacgggctcgaccgaccggacgaaagaaatcgcggcccgttatacggataagatttatgattttgaatggatcgatcactttgcggccgcccgtaactttgtgttttcgaaagcggaaatggattatattctgtggctggacgccgacgatatattgacggaaaaggaccgtgaaaagctgattgaactgaaggcgtcgcttacaaaagaggtggacgcggtatccatgtattatcacgtcggctttgatgcacggggagaggtcagcttcagataccgccgcaaccgactcgtcaagcgtgaaaaagggttccgctggatcggagccgtgcatgagtatcttgaagtatacggaaacatcatagaaaccgatattgccgtcacacaccggaaatccgagaaaaagcactcgcctccctcagaccgcaacttgaagatttatgagaaaatggcggaaaacagtgaaacgatgacaccgcgcgatttgttttacttcgcgaatgaattaaaggatcacggccagtatcagcgcgccatcacgtattatcaccattttctttccacaaaacagtgctggatcgaagacgagatcagaacgtgccaatatctatccgattgctacagggcggtcggccatgaagaggccgccatgacgtctctcttaaaatcatttctgatcgattgtccgcggccggagttctgctgcaggctcggcgactattttgcggagaaacggcaataccggcagggtgtgttttggtatgagctcgccctatccgccaaaagcagtgatgcaggctttacccagctcgaatattccacctggtatccccatctgcagctctgcgtctgccactggcagctcggcgacagagaaaaagcgaagattcataacgacaaagccgcctcctatcatccgtcacatccgagtgtcctgtataatcaaaacgtgctcggcacataacatcgaaaaaaagagctgccccgtatgaagggcagctccttattgattacgctgtcggaattcctccgcttacactgtaaatctgggatgtcacatagctcgattcttctgaggccaaaaagacataaatccctgctagctccgccggctgtccggcgcgctttaatggaacggccggtgtttccttgccgaatttcggaatgttttcaccgggctgtcctcccgaaatctgcagaggcgtccagatcggccccggcgctaccgagttgactctgattcctttattcgccagctgttttcctaagccgacggtaaaaccgataatggcatgtttcgtcgcggcataatccaacagcatcgggcttggattataaccttctacggacgttgtcgtgataatagacgcgccttccggcagatacggaagcgcggctttgacgagccaatacagcgagaatacgttgacttcaaatgtttgatagatttgttctgtagtaagatcgctgatatcatccactgcctgctgtttgccggcgacaagagcgagcgtgtcaagaccgccaagctcttgatacgctttttccgccaattctccgcaaaacgcttcatcgcttaaatctcccggcagcagaacggcttttcttccctctttttcaattaacgctttcacttcttcagcatccggctgttcctcaggcagatagttaatcgccacatccgccccttccctggcataagcaatcgcggcggcccggccgatacctgaatcgccgccggtgacgagggcttttcttcccttcagcttgccggctcctttatagcttgtttcaccgcaatccggcacaggcttcatctctttttgcaaaccgggcggttcttgatattgttttggaaattcatcatgatcatatttcgtcagcgggttgtgcagatttgcatcagacatacaagactctcctttatcattggtgatgtattcgtatgtgtacccctttagcatgacggatcaaacgtgtaagtgcagtttccgattgataaagggaaaacaaaaaaggagcccgtaagctccctttttttatgactctccgagtacgttttcagccattttcgctaaatgctgggcgcttcccgaaatttcctgcatcgtggcagaaatttgttcaaccgccgccgcttggccgtttgtattctggttgatggattcaattgagtcctccagccctttcagcaggctgtggatttttttcgtaatctggtcaatttggccgacgttgtcttttgaatgagtggcaagcttgcggatttcgtccgccaccacggaaaagcccttgccggattctcctgctctcgcggcttcaatggccgcattcaaaccgagcagattgctttgatccgagatgcccttgacagtgacggaaatgtcggcgatttctcccgcgctttcactgacttgtttcgcctgagtggaaatcccggtcatctgtgctgagaaaccgctgatggattctgagatatccgcgattgccgaagcggtctgttccacgacggcggacaggctttcagcgacatcatgaagcttggctgatttttcaaggctcgtgccgagaccgacgccgccgatgacttttccgttttcatcatgaagcggaatcgctctggcgatcagcggaaatccgaagagctctttcggcaccatgcttgtcttcttctgattcatgcggatcgcgtctgtaatgatgtcccctttttgcagcgggtctcccggctttacgttaagagaaaacgttttagccggaatattcacgattaatttttctgtatcataaattccgatggtgatgtcatcttggatcaggctgtttaaaaaaggcgcaactttgacaaatgcgtcaagcaggctgtgcgtttgctgctccgtctgtatactcatttctttcactccttcttaatatgggaattgccgtttttcatgctgaaccgaaatccatttcagcgtggtgaattcttcaaggctccattcgccgttcagcctgccgagacctgattgcttctcaccgccgaacgcgacgttcggttcatcattaatggtcgtatcgttgacgtgaatcatgccggtttcgatccgcttagcaaactcaacgccgcgctcaacgtttgccgtatgcacggctccgcttaaaccgaacggtgtcgcgtttgcgatgcttaccgcttcatcctccgtttcaaacggcatgatgcagacggccggtccgaacagctcctccttcgcaatgctcatctcaggtttcacatcttttaaaatgacgggctcagcgaccgttccgctgaatcggccggccagcaccggaaccgctccctcttctatcgctttttcgacagaccgtctcagaccttccgcctgtctctcattgattaaagggccgataaccgtatcagggtccatcggatcgccgactttcagcgatgacactttcgcttcgtaaagctctgtaaatttgtcatatacagatgtgtgaacgagcacgcggttcgccgacatgcagatctggccttgatgcgtaaaccggctgaatacggccgcattgacggcgtattcaagatcagcatcctcaagcacgatcagcgcgctgtttccgccaagctccaacagcggttttttaaagtgtttgaccgcaagctgtccgatatagctgcccactccggttgagcctgtaaatgagattatccgcgggacgggatgctcaacaaagctgtcgccgatctccccgatatccgtcacgataacattcagcagcccgtccggtacgccggccgcttcaaaaattttcgcgataagcgttccgccgcagatcggtgtttcttcatgaggcttcagcacgacgccgttccccgcgccgagtgccggcgcaacagatttcatcgaaaggaaaaacgggaaattaaacgggctgatcacccccacgactccggcgggtattctgtacagtctgttttcttttccgtcaatcgtggacgggagaattttcccttccatccgcaccggaaatgttgcggcttcttttatcatatttttgacaagtccgatttcaaactcagccttcagccgtgttccgccaagctcctccatgattaagtaaataatcgcttcttcgtgctcttcaatgaaagaaacggctttttccaaaatggcccgctttttaaaagggtttactttgtcccattcttgtttcgcaagagccgcggcgcgatatgccgcatccacgtcatcagacgtcgctttttggaatgaggtgatgactttttgagtataaggatttctgttttccaatacgttccggctgctcccatccctccatcggccgccgataaactgcttatttagttcttcatattgaaacatgtaaaacatctccctttcaccgaaacttgaaattagttgatgagtcatcttttgtatcggtcttaaggtgagaaaattgaactatttcacaataaaattcccgtccttccgtgcatcgacgctttttagctttgtccttttaaagtggaaaattctttaattgactgcgagaaatttcgacaatataatacaaacgtcagtgtatataatgataagaatattatgaattttcaggaggactcatatgtctttactatttcggaaaaagccgctggccgacttaaaggctcagagcaaacagaccagtctgtcccgctcgttaagcgcttttgacttggttttgctcggaatcggctgtgttgtcggcacggggatttttgtgattaccgggactgtggccgcgacaggcgcaggaccggctttgattctgtcgtttgtgctcgcgggccttgcctgcgcgctcgccgcgttttgttatgcggaattttcttcatccattccgatttcaggcagcgtatatacgtattcatatgtcactctcggggagtgtctcgcgtttttaatcggatgggacttaatgcttgaatatgtcatcgcgctcgccgccgtcgcaaccggctggtcatcctatttccagtcgcttcttgcgggcttcgggctgcatcttccggaggcgctgaccgccgcacccggcagcaaaacgggtgccgtgttcaacctgccggccgttatcattattttggtcattaccgcgattgtttcaaggggcgtgaaagaaagcacccgctttaacaatgtcattgtattgatgaaaattgcgatcattctgctgtttatcatcgtcggtttcggctacgtgaaaccggaaaactggtcgccgtttatgccgttcggaatgaaaggcgtcatcacgagcgccgcgaccgttttcttcgcgtatctcggatttgatgccgtgtcaaacgcgtcggaagaagtgaaaaacccgcagaaatcaatgccggtcggaatcatcggcgcgctcgccatctgcaccgtcctttacattacggtatcgctcgtcctgacgggaatgctttcgtacaccaagctgaatgtcggggatccggtatctttcgcgctccaatttgtcggccagaacaagatagcaggcattatttccgtcggcgcgattatcgggattacaacggtcatgctcgctctgctttacgctcaggtgcgccttacatttgcgatgagcagagacggccttttgccccgcatgttttccaaggttcacccgcgttttaaaacaccgtttcaaaacacatgggtgacggggatcgctgccgccgggatcgcgggttttattgatttgggaaccttggcgcatctcgtcaacatgggaaccttggcggcctttacggtcattgcgatcgccgtcatcgttttaagaaagaaacatccggagatcaaatcttccttccgtgttcctttcgtgccttttgtgccgatcatcagcgcatgcttatgcctgtatctcgcaagcagcctgccgggcgtgacatggctcgcctttgtcatctggatcgccgccgggatcgtcgtttatatgatgtattcgagaaaacacagtttgttaaataaataaaaaaggaaggctcttttttctgtttgagaaagaagagccttttttgcacttgataattcattcaccttatgaataatatggtgtatgcttcgtttacataaaaaggaggagaatcactttggcaattgccgccccgcttaaagaaaaacctgtccatcgtcccgagacaaccatgtattctattttgttcattatcgggatctgtcatctgctgaacgattcactgcaagcggtgattccggcgatgtttccgattttggaacgttccatgaatcttacatttacgcagctcggaattatcgcctttacgctgaatatggtgtcttccgtgatgcagcccgtcatcggctggtatacggataaacgcccgatgccgtatgccttgccgctcggactcaccgcaagcatgctcggcattttaggtctcgcgttcgccccgtcttttctgacgattttatgctgtgtcttttttatcggccttggctccgccgtctttcatcctgaaggatcgcgtgtcgcctacatggccgccggcgaaaagcgcggcttggcgcaatcgatttaccaagtcggagggaataccggccaggcgatggcgcccttgattaccgcgctgattctcgttccgctcggtcaattcggctctgtctggtttacgctagtcgccgcaatcgctgtactgtttctcatttatatcgccaaatggtataaaggccgccttattcatttgcgcgccgtaagtaaaaaatcaccggcctccgccgtgcagaccgtgattacaaaaccgattattctcgcccttatcatgattatcttcttaattttcgcgcgctcctggtatgtgagcgcgatcggcaacttttatacgttctatgcgatgaatgcctatcatgtcagcattcagcaggcacagagctatatcttcgtctttttatttttcggagctgtcggaacgtttctcggcgggccgcttgcagatcgtttcggaaagcggaacgtcatcatcgtttcgatgatagcatcggctcccttgacgattttccttccgtttgcggggcctgtcatcgcctatggcgtactggcgctgatcggtgttgttctgatgtccagcttctccgtgactgttgtctacgcgcaggagcttgttccaggcaaaatcggaacgatgtcagggcttacggtcgggctcgccttcggaatgggcgcgatcggagccgttgcgctcggagctcttattgattcagcgggattgacgccgaccatgacagccgtcgcctttctgcccgttttaggtctgctcgcctttgtcctgccgagcgacaaaacattaaaagaatggcattcataaaaacaatccctgccgaaaaggcagggattttatgtttcaactgtataaaaatgagtatcaggaaccgcgtatttcggaataaacccgtctctgaaatcaggaaacgctttttgaatttcatcaatccatttttttacgtttttgatgtacggtacgtaaatcatattgactgtcgcctcgtcatcaatgtgatagtaccagcacagattgaattcgttctccgtgacgagcgtaaagcctgaaaaatgataaaatatcagcggggtgtcattgacatacacagccccgtcacgcaggctgacgtcatattgctcaatattccaaagcgccgcattcgcgccgatcgactccgtgacatgaacgtgttcaaactgcgcgggccacttttcaacatacctttggtcaccgtatgtctttttttcttcattcatctccaccgtacaataggagatgcaatcctgtctccactgccagaccgcccgatacgcttccccggtattccgcgcgccgacaaacccggtgttgtactgccccgtcagcttgtaataagacgcaaaccgttctgaattgcggtgatccgtcagaaaaagggaagcatccggcttttccgcaaacagctcgcccgcatctgagaagaaaaagagatcggtgtccaagtgggcaaaatattcagcttcatcatactctgtcatcacatggaacagaaatgccggcttcagcgtccagcaatattcatgaaacgtccggccgccctttgcttcaagcagctccgggtcctccatttcatggagctgaaccgccgtgacatgttcccacggcacctgctgaagcaattcatacgctttctgatcgacacacagcacatacagatgaaaatcccggcaatgctcatggagagaatgaatcatcggcatcagtttaaagatatgcgttctggaaacaatggttgaaaaatgatatttactcaccatatcacatccaatttatttaagatccacatgcagtaaatcagcagccagcgctttgaacgcccttgcaaagtgcgtgacgcccagctttttttccgcttttgccaaaagctttccgacctccggcagattgaagctgttcgccgtgatccgcgggcttttcgtcttccagtccgggtcgaggttgcggtctttaaccgcgtgcagcagttcgagaaaaatgtgcagcaggctttcatatttctcataatcaagcagcacttcgatgtctgccatcatgctgttggttaactccgcgtcaaacgggccgttaaacgcgaggtgcacgtcaagcgaatgaatgtcattgtacttgtcgcacatgtacgcgatgttcgccctgatgtcatcaacggaagcgcagttgctcggatgctcctgatggacgctcatgatatcgcgccgcagctgaaatctcattcccgactgatgaagcctgatgccgagatcataatcttcaaagccgtatctgacaatgccttcatcaaacaggccgagatctgccacgtgctgtctcttaactgacgaattgttcgtaatgaaaaaacgccacggcagacggtagccgttcaaatcatctccgtatttttccaaaatgcttttcagcacacggataaagtcggtatctaaatcaaagcattggtcgagaaaacttccgtctctgatgtcaccttcttcaaggagcggctctttatcgcccggcagctcttcatacagttcggcgagtttttccttatgctctttttcaaaacggtcataataaaagctgtaaatccgcttccagaacataccgcatacgacaagatcgtcccggttctcatgagccttgatatgcttcgccaccaaatccttttcggcaagcatgtcgctgtcatggaagatcaaaatatcgcctctggcattgcggaccgcctgattccggccgtaagcgatccctctgttttctttaattctcacaaaaatcagcgggaaattcgcgctgaatgattcaagcatggataaggttccgtcttccgaaccgttgtcagccacaatcacttcgaacggctctgtgcattcctgttcattcagggacagcaggctgttataaagcctctccttggaattatatgcgggaacaatgacgcttgccttcacttttcgttcacttcctgtatatgatcatttatttgttatcatcctcagatgcaaagccgctgaactccgggcagacggcgctgaccgtcccgatcacccgcttcagaatgtcctgataaagctgatggacaaacggcaggtcggtccggtccgtctcatgaatctgccgaatgtcgccggctgtaacgatccggtatccgctgaaatgatagaaaatcagcggacttccgtcttcgagcacaagacgcccgtccttccatgaaaacgtgtggcggccgtaattccaatggccgatattcacgccgggcgtggtgatgtcacacacattcgggaacaggccggacatgtaatccaagtagccttgatctccgaattttccttcgcccggcgcatttttgcattcttccaggcagcgttctttccaccatctgagacaatctgtaccggcactgtcggttttgaagctgagaaaaccggaattataccggcctaaaagacgctgcagcatgtcgatttcctgttttccaaatgagggaatgacgatatcgccccgtgacagaagcaccgaacaatccggctgattgtcaaaaatcgcgcgcggatcggcgaagaaaaacaaatcggcatcaatgtacgtgacacgctctaattccggatgtccgtccagcacgaattcgagaaataccggctttaccgtccagcagtattcgctctgatccctcgtccgcttcagttcaaggagctcctcattttccagtgcggacacctgaatcaaggtgacattatcctgccgcattgcctgaagcacgtcataggtgtcttggtccatacacaaagtaaaaatgggggcgtccgcctgaaccgctttcaatgagccgaacaaagcgatagcctgatacagccttccttttgataaaactgtgcaatatgcgcttgtcacgtctttctctcacctctgtttctgttacttttgaaaaaaggctttataccattcgatcgttttttccaatccttcatcaatggtatgcgcgggcgtccaattcagaagcttcctcgccttttccgccgataaatattggtgcttgatttcatggcttccctggttgagcactttcggcttgaggtcactgtccatggccttaagaattttttctacaagctccagcaccgtcagctgaatctcattgctgaagttgaacgcttctcccgcaagattgagctcctccatcttttccgccagcaaaaggtatgcctcgaccgcatcctcgatgtaaaaataatcacggataaatgtgccgtcgctgcggatttccggcgcttcaccgttcagcacgagctgaatcgtctgcggaataatccggttaaagttcaaatctccgccgccgtacaagttgccgcagcgcgtaatacagaccggaagtccgtacgtattaaaatatgtgtggcttaacaaatcggcacagctttttgatacgtcatacggatgtttgccctgaagaggcatgttttcatcgtacggcagtgtcggctggtcgccgtacgctttatcactggacgcgacgatcacccgcttgatgagaggatgcctgcggcacgcttcaaggatgttccatgtgccgagaatattggcttcaaatgtggaaatcggattgcggtttgcgacgccgacgatcgcctgagcggctaaatgaaagaccgtgtcaatttcatattcgcccagcgcccgctcaatcacatccagatcttcaagcgcaccctgcacgatattcatttgtttcacttgttctccctgatacaggttcgacttaggcacagtgtcacggacaagccccgtcacattggccccctgatcgatcagttccttcaccaagcagcttcctaaaagacctgtacatcccgtcacaaacacatttttatttttccagaaactcaaacttgatcaccataccttccatacatgttgtccccggtcccacatcttgttgatttccagcaggtttttatacgtatcgatcgccgtccagaaaccgtaatgccggtataccgccaattcgccgtccttcgccagctccttcagcggttcttcttcaaacatgacatccctgtctttcggcagataatcaaataccttcgggctgagcacgaaaaatccgccgttgatgatgccgtcactcgaggttttttcagaaaagcttttcgccatgccgtcttcaaccgtcagcgttccgaattgcgaggacttttctataccggtgacggtcaccgctgccccttttgattgatgatagctgatcagatgaaacaggttgatgttggccagtccgtccccgtacgtcataagaaaggtttcatcaccgatgatgtcctttgcctgtaaaagccgccccgctgtctgcgtgtgttcccccgtgtctaaaaaagtgattttccacggctcggattttcccaatatccgtacttctccggtagagctgtccagcgtcatgctgtgattcttccagtcataatctaagaaatattccttaatcatctctcctttgaaaccaagaagcaggataaattcgttcacgccatagtattgatagagtttcataatatgccatagaatcggtttgccgcctatcatggcgagcggtttgggacgttcattggtgatttcgctcattctcgttccttttccgccgcagagaatgactgctttcatctctacccctcttctctgtgaatattggattcgaaaccgcccgtataagagaaaccaacccgataatttgtccgattctctatcaccggtttcaaaatctactgtaagatatgagagattggcgccctttgtgaccaaaagctctctcttttttcagattggtgaagatacacaaaaaaaagagcctcacggaaattccgtaaggctctttttattatttattatcctgattcagcttttctttgccgtaatgatatttagacggatcaaccggcgtaaagtcgctcaatttgtggaatctgagcaagtctttgtacatcacgctgtcagacagcttcagctgctctgtgactctggctttcaggtttttcgtttcctgattgcctttcagttcttttcctgtcttcgtatcgtatacgacattggagatggaagtatatttcggcgtgacgtaatctccgttacggaacgtcaccgtatcatcatggtctttcgagaagagatcggtgccgaaattaatatatttcttagaatcgatgccttccaagtgaaggatcgtcggcacaacgtccatttcaccgccgtacgtatggttcaccccgccttttttgccagggatgcgaagcataagcggcacacgctgattctgcgcgttttgataaggcgtaatttctttgccgagaatttctttcatcgcgcggttatggttttcagagattccgtagtggtctccgtaaagcataatcaccgagttgtcatataaaccggatgacttcagatctttaaagaactgttcaagcgcctcgtcgagataacgcgccgtctggaaatagtcatccacagtcgcgtcgcccgtcttcgctttttcgatcgttgcgtctttttcatcaagcgtaaacggataatggttcgtcagcgtgagcaaatgcgcgtagaacggctgtttcagcgattgaagcttcggaatggattctttgaagaatggtttatccttcagtcccatattgacaaggttgtcatcagacatatcgtatgtgctggcgtcaaagaatttatcgtagccgatatgtttgtaaatctggtcacggttccagaatgatttgtagtcaccgtgtaaaacggcgcttgtatagccctcactttggtcaaggatggcaggaagcgattgatacgtgttttccccttttgtcacgaaggctgacccttcaggcagtccgaacaggctgttatccatcatcagctcggcgtcagatgttttaccttggcccgtttggtggaaaaagttatcaaagtacgtcatgtcctctccgccgcgggcgagtttattcaggaacggcgtgacttcttttccgtcaagtttgtagttgatcaaaaacgattggaagctctccaggtgaatcttaatgatgtttttgcctttggccttgccgaaatactcggcgttcggcttcgcataatgcgacgatgtgtagttttcaacgctcgtcaggtcatcgctgctggcatatgcccgctgggattccgtctgcgccgtctgtacgccgtcataaatcgtgtaattataaaggcctaagtattttacaatgtaattgcggtcaaacgttcttgtcagcagctccgggcggtcctcttcggcaatcgccaggttcacgaagaacaaaacaatacccgtcacgataattaatgacgtataccgttttttcagcttgaattccttcagctcacgtctccacaccagaagcgcgattaaaataataatatcaacaaagtataaaatatcatggccggacataatgctgaagatgccgtctcccatatttcccacattaccggattgctttaagttcgggaatgtcaagaaatcatcgaagaatcgatagaataggatatttgcatacaaaataaacgtcatgatgaaatcaataatcaccatgataatcgctgatttgcggcctttcgcaaacaatgccagtcctaaaaagaaaatggcgcttgagaacggattgatcacaagcagaaactgctgcgtcggacccttcaccccaaggttaaattcagcatgataggctaaatacgttttggcccaaaacaaaataatagccagtacaaaaaaactaagtctgtaagaaaataatttcttcatggcaacctctactttcctaaacactttaaatctgtattcttactttttgcttcaattcctgctttccgagcaaaacgaaagcatcacacagccccataaacacaccatttataaaaacgatatatttatcattcgtgtcatgcccattgaacatcttatcccgccagccattagacgcaggatatccgttcttcgtttcacatttttttctggcattaaaaggtaccgtatcagacccggtctaaaaataggagataccaaatataagaataacacaaacttctaaaaacgaaaaatgaatatcaaagacagccgcccaacaggcgggctgaagttattgtatgcaaaggggttgaaaaacttgaaggtttttttggctgatgtaaaaaaaggactggagtcatccagtcctttacctgtcaaatccccgcccaaacatcttttgcgtaaatgccttttgtctggaggttcaaaagccattcttgcgcttgccgttcgtctgtttcgtggaccgactgatacgctttttgcagcgttgcctctacatcgggcgccattttgctgccgtcgccgcatacgtagaggtgccctccccggccgaggatggaaattaaagcgccggcgtctttcgccattaagtgctgcacatacgttttcggtacgccttctttgcgggagaaagccgtatgaagcgtcacgattccgtctttttcataagcttcaagctcgtcacggtaaataaaatcatgatcgtttctgcatccgaaatacagatgagcctcccccagctcttttccttctttttttaacgccgcccgggcttgcagaaatccgcggaacggggcgactcctgtgccgggaccgaccataataatcggtttttccggatcttccggcagccggaatcgtgtttccggagtgcggacaaacattacgataccatcctcagggccgcggtccgctaaataattcgaagcgacaccgcgatactcccccaaaccgctccgggcggggccgcgaacgacgccgacggtaattgaagcctgcccgggatgtttccggggcgaacttgaaatcgaataataccgcggcttcaacgggcgcaaaagctccagaaatcgctcaaacggaagttcacacgcttcatatttttcaaggagatcgagcatcgagacgcgcgatgttaagatttgctcctgatagacgccctcctccagaaaatcttccaaatcccgtttgtgcggcgggcagaccgtataagcggccatttcccggatttgagcccttgatgccgcttcctgcaattcgacacagctgctcagaagatcatgcagcctgaccggccgatcgagcgggagatgaaccgcgctctgtccgctggccgtcagcagcacttgatcattcccgttcagattgaaccggcggagaacacggctgacctgctctttgctgtttaccggcagcacgccgagatgatccccttcatgataggcagcctctttcggcagagtgatttcgatatgccttgtgctccggccgctttccggcgcctgaagttccctgttttccgcaacggatgcgtaaaccgcttcatacgtctgtgccaaaggagacccgccaagcccgctgacaaattgaaggcccagcgcacttcgctctttttcggcattttcattcagcttgagaccgaatgccttcatggcgtccgtccacatgctttttttccattcatcaagctttccttcaaaatcgccgctgacgtccccctcgcctcgggaggaaaagcgttccgcccctttttcggcaagcttctcatcaatcagtctcggcacagcctgatatgtcgccgcccagttatgatcaccgcagccgaagacggcataccggacgccttccagctccccgggtttgacttcttcaagccattgaacgaattgtcccgcgttgctcggaggctttccgttataagaggacgtaatgatcaagagagctccttctttcggcagttttccgatccggtcatttaaaggcgccgtttcagtccggacaccgtgcatcccggcagtatcggcaagctcccgcgccacgccttctgcggttcccgtatctgagccgtacagaatcagaagcgttcggttatcaagcccgataatggatgcgccttttgtttcccgtttttctttttcgacgtcttcccccgctttttcagccgccgggagagcagccgcaacggcttctttatttctcggccgcacccggatatgaaagtcgccgggcttgatcgtcagtgtctgtttaatatcgagctcataatcggtgtgatcgataaaggtaaaatgctgcagaatcatccccagaacaagagttgcttcatgcagggcgaactgcataccgatacacgccctctgaccgtttccgaacggcttatacgcatggtgaggcacttgatcaggatgttcaaaccgctccggataaaattcctccgcattgtctccccacgcttctttatcacggtgaagctggggaattaagacggaaattctgtctttcggcgtgatcggatatttcccgccgatcaccgtatcctctttcgcataaaggctgaacgcaggcgcggtcggccataagcgcaatgactcctgcaaaatcattcggatataagtaagatccagcacttgtttatatgaaggaacaggatcggtcaatacccgatcggcttcttcataggctttttccaaaacacggggatgtttcagcagaaaatagatggcaaaggaaagcaggccgcttgtcgtttcatggccggcaattaaaaacgtgatgatttggtaccggatattttcatcatcaagtttttcgcccgtttccgggtcttccacattcagcattctggccagcagatccttttcatcccggccgcctgaccggcgctctgcgataatactgtctactaacgaaaacatcgcctgaatgtcatgatgaaattggcgcttcgtcctgatcataagcttatcctgaacatcaaggcgctgcatttggtgcatcgcttcatcaagggcgcgcaccatgctgttgataaacggatgaggcgtttccctgtaatagctgttaaatcgatagttaaagccgcaaagcccgatcgtatcaagcgtcaggcgggtcatatcagcaggcacatcaacggcctcatccgggttcagcctagcccatttttgaatcagctgcaccgcgatatcagtcatcatcgaatgataatctttcatcgcgcgctggctgaaagtcggcatcagaatattatgcgcctttcgccagttaggctcatgcgtccagcttgtaaacagcccgtcaccggaaaacgcccggactttctccaaagctccttcaatgcttttatcgaaccgttcttcatcacaaacctctttcaccagttcatggccggacacgacgataatggcgcccgccggggtatgcagctgaaaaataggcccctgctcgtttgccagtttgattagcgacattgtaggcttgtctttatcaagcaaaggaagattgccgagcgggccgaatgtctttggctgcggaatcggacctgtttccttcatgaataacaccctttctaacacattgatgcgttccttccaactacattgcccttttcaccggccgattatccgccgtcacggatcaatcatcggattgacgatcgataacggttttttctatactggagaggcttgttaaatacagaaataaggtgagttcacatatggattttgaaatcaagtttttatcgttttatgtcattcaagtggaaggaaaagatgaacaggcaaacaaacagttcaaacatttccagacgcttgacacggaagaatttgaagaaagcgagctgaaggattttcttgacggggaattgaagaaaatcgtcaaacggaaagccgaacggcatccgcaatccgagcaggtcccaacaaaaatcggccattttatcacggagccgggccatgagcttgattcaaatccgaattacaaccttttcaaccgcgccagacttgcggatacgaaggaagcatttatcgaagcaagcgagcagttcgtccgcacttaccttgacacgagcgccgtgcgcggcggtgtttttatcgtggcatcggccgttccgcgcaagtattttgaagacaaattcgtctttatgatgaaatgcgatttcgagccgaaggtcgcccgcatctcagacgcctcgtctctcattaaaaaggtcgaaatggccatcacgacaaaaaacatgaaaagcattcaatatccgtatatgccggaagaaggcatgacggaagagcatgagctgaaaatccaccaggcctcgcacgcccgttatttcgaagattttctcaaatttgtcgaatatggcgaatcgatgccggaaatcatgaaaagccaagtcatgaacatggtgcaggaacacgtgtatgaaacttttgaagaaaacagcgaagagcttcagcagtttgagcacgacattgaaatttgggaagcaagtgaaaagcgggaaattcaggagcgcctcgacacccatcaagtcatcgaggcatccgcgcagatcattgaacacacgccggaagccgagctgaaaatgaaagtaggagaaacagagattaaaggattactggctgatttcggcgaatccatccatctcgcaaaagtgaacgggcgctatgtcgcgctcattgaggcggagacgatctcgtttgaaaaaggcagttcgccggtggagtttcacaagcctgaggggctgcatgaggtgattgaacggatacggaataaatctgaacaagactgacaaaagtccagacgccatgttctggactttctttatttaataaggctctttgagcaatcgatagcattcactgatgatgtcttggacgccgggcgttccttttatctcgcggcggacgatttcagatgagagattctgcacctgtaatgcccgctccgcccgtctttcgaagtatgcttgacatgcagtttcatggttttcgtgttttcgcagttcttcactaagcacaaccgcgtcttcaattgccatcgccgctccctgcgccaatgtcggcgctcctgcatggacggcatccccgcccagaacgacgcggcctctgtgccacggttctttgaccgccatctgctcaatcttatgaaacaaaacgggatattcctttgacatattctctgtcacaaactttactcccggaattccgcgcagcaagtctttcacccgttcaaaacgcgtgtcctcgtcatccctgaagtcagcgtcatacggccggatgataaatacgtatcctgttttttcagagagcggcacgactccgacctgcgtctgcccttttttatacatcagtgtcgaatcatgaaatatcggctcgggaaaagaaatgtaaaatctgtgcgctcccatgccgagatactctgttttcacttctctttgcagcatgtgatcgcggacagcggagcggatgccgtcaaagccggcgagaatgtcagccgtcatcatggttccgtctgcacaatgcaccgttatttcatctgccgtttcttcgtaagacacgacttttttaccgggcagaatcgtgacccccgccgcttcagcatgctttttgaggatatcgtttaacgtttgacgcaatatattattccgccccggcaatgaatcatctaaaaacgcctcactcactttaaactgcagcgttccgttttcatcatgctgcttcagccattccgtttgaaagccgtgttggcagcattcatcatacacaccgatttcccgcagcacccgcagcgcattttgaggctggagaatgcccgctccgctttttcgcatgccggacgccgcctcgcaaagagtcacttcaaaacccgctctgccgagagaaatcgctgcggacaggccgccgatccctccgcccgctatgatgatctttttcacttcatggttcatcacgataccgccttctctatttatttattattcattaactattagccaccttactatatagactgaaaaactgtcaatctttataggttgccttttgaatccggcaagcttatactttgaatcactaaaatggtacggaggcttacaaaaatggagttgagacatttgccggattactcgcagattgccggacgcgctgagatttacgccgatatggatgctgaatcattgaaaacatttttgacgttatttgatatgtctaaaaaaatgaatcaggtcatggagcattatttctcaagtcacggattgtccgaagggaaattcaaaattttgatgtttctgtttgacgcacccggccacagcctgagtccgacagagctagcaaaaaaatccaatgtcaccaaagcgaccatcaccggattgatcgacggactcgcacgggacggctttgtaaaccgcagccggcataccggcgacagacgaaaaatcagcatcgaactcacaaaagaaggaaaagaaaagctgatgctgtttcttcccggccacttctccaatatttcaggagtcatggaaagcttcaccgctgaacaaaaagcggaattgacaaaaatgcttgaagtattatttgataagcttctgctgttttccggcggcagaacataaagtagtatcgtaaaaacaaaggcaaatttctatgagatggaaattgaagtaaaaagatgagggttataaaaaaacagcctgcacatttgtttgttcaggctgtttcagaagaaataattttaaaattactttctcttcactataaatgcaggtgttttaatgctggaagttacatttgtatatcgatttttagtcttcaacctcactctcacactatttgatcctttttttaacgatttttgatttgagagtttaaatacttttttaggtgttgagtgactgaaagaacctttctttgtttcattagccacccattttgaaccgttccaaacatcaattgtcatggaataatcaaatgttgcgattgtcccgcccccatatgatgctacacaatcaatggaagtagcttttgcagaataagaatccgcatcggtacaaactctcaatacatatgttgcataatctgtactacaaggcataatatccttcccctttcaaattttttgaaacaggcttgttattatgacaaaccctccgttcacttctagctggcaaacgtatgacaaaggggatctcatggcttaggagagtaaaaattcaaaactcttagaaattaacaaaaggcgcccctctcagcagggcgcctttttcgcgcggttaatcatcactgtttaaaattccgaaaaaccgtagcaggttgataaacaagttaataaagtcgatataaagcgtcaatgccatcaaaggaatcaggtcagccgtgatgtcccggtgcttgatctggttcagatcgtataagatgtacattgaaaacacaatcgtcccgatgacggaatacgccatcatggcggcggaattcagcgggctgaaaatattaaagatccccactgcgagaagtgcgataacagcgacaagcaagaaggaccataaaaatgacaagtcctttttcgtcttagcgccgatcgtgccgagcaccgcaaaaatcacaaacgatgaaccgaatgcctccaatacgacataggcccccgctgcggacgcataatggctgataatcggaaacagcgtcattccggaaatgaaagcgaatgaaaacacaaacacatatccgacggctttttttcggcgcagccaaaatgcggcgatgatcatgacgacctctaagaccgacagcggcagcatcaatgccggcggaatgaactggcccgtatacaggccgattgtcgcaactaacagtgtaaacacaaataccgttataatgcgctgcataatagattgtttgctctcataagcagcagtttgcatgtcaaaagtcctcccaaaaaaatgatcttgataggtctattataaataaaatgggagaaatttgtatgattttaagaagattttaaggatgtcaggcctgacgttttgctgcgcattcctgcatatccatgaaatcatgcagttttttcgtcaagccgccgtgcccgaatcggatcttccccttctgccccggcgttttcgcgaaatcgagaaatgccagcacataaagacgcctgacgggaatcggaatgacgcccgcatcataaaaccagccgtcaattgtattgagcacgcctttgttaatgccgtattgcttcgtgcaccaatgcagaaagcgcacttcgggcaggtgcagataccggctctcccggaaaggaacagttgaatgcttcatatgtaccgcctcctgtcattggctgttttttaagattgttttacttctttgctcttcagggaaaatcgatatttctccaccttatcaatttgtgtcacttgggaattatgaaccgtaatctgaactgtcccgaaatcgagcgtttccagcgcgctgataatcttttcaatcacatgcggatctacgtttcctttggacgtcatcatgctccccctttatgtctggccgttcgtcttttgacaatgagtgttttaattcatactattctgataagaaatatataattatactattatgttttcattcagaaatcaataacatttacacaatttttggatatgttttctttgcgaaaactgtcacttccttcgctttgatttaaaccgtttcatcccgaaatcgactcccaaggcgtcatatagctgtttttaagaacgcaatcttcacgttccgacatatttacattgttttccgctgacaaaaaaagcgccccgcctctggccggagcacctttttcctatgcttttgcttcctcgatcacacatgtgacacccatgctggcgagcgcctgctccagggagccgtaagtttgatactctgaaaaatcaagccccaattggatagaagtctgtgccacatcaggccgaatgccggaaaacacggttctgatgccgagtagaaataacgttttcgacagcatatacaattgttgcgccaccatcgtatcgacaatgggcacaccggacagatcaatcacaaggtttgtgatccgtttggcgacacagttttccggcaccgactccaaaatcacgcgcgcccgtctcgtatcaatcgcgccgatgagcggcagagtgccgatcgtatctgcgattaaaataacgggacagctcaattcggaaataagctcctgctgagatgacagcctcgcgatcattaatttctgaaactgttcagtaaaatccgtcatcagctgatcaaacgagccgttgacaaggtgattccagcggcgggcatcctcgtttgttacgatgtcctgatgctcatccataaaacgggtgaccgcctcccaaaagacggttcttgaattgccgatcgcctcaacgacctcatgaacctccgcgtcttgctccactctgcttttcgctacctgtgcggcccatttttctttgttatgctgaaaaacggcaggatcctccaaaaaagcacttgcgatgaccgtgtttgtaaaggtatgctgctcgatcagcagccgtttcatttcctcacttaattgatccgcagaataaaaacgccctctcagcttccgtctcagcttgagccatttttccgtcagctctgccgaatgtgtaataatataatcatgaagtaattggtctttgttcactgccgtctcctctttcaagaatatgtacttttgtttaaattataaatcggaatcaccgatcgcactagagaaattaaaaaaaccggcacattaaagcttttgattgcttttttcgacaggaggatacactataaaagaaatgaaacaggaggtcagtatgatgatcaataaaatcgcgacagtcgccgtatacactgatgatcagcaaaaagcgaaaacattctggacggaaaaagcggggtttgaaaccgtcgccgagcatccgatgggcccgggcgccttctggcttgaggtagcgcccaaaggggccgccactcatttggtgatttatccgaaagcaatgatgaaaggggccgagtatatgaaggcttctatcgtatttgagtgtgaagatgtctttgccgcatacgaacagatgaaaaagaacggtatcacctttttagatgaaccgaaacaaatggaatggggcagcttcgtgcaatttaaagatgaggatggtcatgtctttctcctgaaatcgtaatccgtcaggcatcttaattgactttgagaatcattttcatttaaaatgttggataaagcgtgaaaaggattggagagttgccagatgttcgtgcaaatcagaaaaatgaccgtaaaagaaggacatgccgacaaagtaatcgaacgcttcagttcaggaggcgtgattgaaaagcaggaaggtttgatagacataacggtcctggaaaaaaaagtccgccgcggtgatgaagaagtcgtcgtgttaatccgctgggagtcagaagaccattggaaacaatgggaaaaaagcgaagaccacatcgcggcccacaaagcaaaccaaggcaagccgaaacctgattatatgcttgggacggatgtcggtatgtatcatgtcagagccgttaaaacaggcgtacacgaaaaataataaagagcatttgccccagggcaatgctcttttcattttttctcctcatacggcaggacaaacagcggtttatcgggcttccattccgcatacagcacgtcctccgtttttttgatgttcagctttttcagctcctgattcagctgcttttcttccagcccggcttctttcagattttcatacagcacttcgccgtcaataatcagcgtgaccggcaaagagacctgcttcggctttatttgcatgtcgccgtttttcgtcgtgtcatattgaaatttcggcaggacgctgaccatcccgtttgtttctaaaatcgcgtactccgcttcctgtatggaaaagcaattcgcctgtctgagaaggctttgcaattgattaatgtccagcttattctttttcagcacaccatatttcagttttcctttatggatgataatactcggctcgccttccaacagctttctggagctttttactttctgcgtaatcagttcgatgagataaattaaccccccccataacagagaggcaaaaatgatttcaaaaatcctgacgcctttatcatacaccgcatttccgaccagttcgccgaggatgagcgcggaaataaaatcaaacggcgtaatttgcgagaattgagtttttccaagtaattttaaaatcacaaataaaatacccaaaccgcatactaactcccaagccactgtaagtaaatgtcccatattcgcaccttcttcttaaaagtcattaccattatggacattcgcctgttttctatacagcggccggcaacacacaaaaaaacgcagccgcggccgcgttttttcacttctgcttactgtttttgattcgatctgacgacccgtaagcacacctcagcggcataaccggcggccgctccggaacccgcaaacatcgcggcaagccccaagcccattccttcccagccgccgacaccgaaaatgctgtaaacaaccgtaccgaaagcagtcaggcccagcaccgccaaaaggcactcaggccacatctttttcggccatttcttgcggagcacagccgatacggcaaagttaagacaaaatgcggccagacagatcagataaaaaaaacccatatcttttacctccgtcatgagaagctttttatttactcacctttttttcaaacaaatgataacccggcgcgagtccttttgattcgtaccccattccgctgtaaaacgactgaagcgccttgttttcggacacgcaatcgagccggattttcgtttttcccggacaagacacacccgtttccgcccaagtcatgattgtccggccgagccccgcccctgcaaaccgcctgttaatcgccagccggtggagatatacggactcctcatgtccctcatcgccccaaagacgtctgtcccacccgcttgcttcgggaagcagcatgacgacgccggccagctcttcattctgcctgaataaaaaaacatacccttgggcgatcgcctcccgcatattgtgggtatcttccccttgcagaaggccgctccactggttcgaccctttatcgcgaagccattctgccgcttgcacgagcagatccatgacctcttttgcatcatctttccgggcggaggtgacccggaatgcccccgccttctcctccgtgatcgtaaatggtgtcataaaagcctcctgtaatcagaatattcgacaccttcattatagaccaaacgcagaaaggaaaaaaacagccgtcatgtttgagggccgtttaaaaaattttcttcttatcacgttcttcttttaaaatctcaaccgcttccctgaaacgcatagagtggacgatttcacgctcacgcagaaaacggagtgaatcattcaggtcaggatcatcggaaatatcaataatccattgatacgtcgctctcgccttttcttcagccgcaatatcttcatataaatcagcgatcggatctcccttcgcctgtatgtaagacgctgtgaacggaactccggccgcattgtgataaaacagcgcgctgtcatggttgacgtaatgatcgctgagccctgcatcacgcagctgctccggggtcgcatcttttgtcagcttataaatcatcgtcgcaatcatttctaaatgcgcaaactcctccgtgccgatatccgtcagcaggccgatcaccttgtcaggaatcgtgtagcgctggtttaagtaccggagcgctgcggccaattcgccgtccgccccgccgtattgttcaatgagaaacttagccagcatcgggttgcatgtactgactttaaccggatactgcagctttttttcatatacccacatttacagatccctccttatacttgccatggccaaggaccgcggccccagtcccattgagcgccgacctgactcacgccgaattgcagaagcggtccgtactcaggttcaaaccgctttctcagctgtcttgagtaccgggaatattcatgaaactgctgaagcgcgagacggtcatggggatgcgtatccagataaagcgtcagctccaccaagacaaagtccgccgcctgaatttgctccagcagccgataatattcatcatcaatctttttcgccatattcgattcccccccgataaggattatcatagaaatcgtaaagatccttccaaagggtcccttttctcaatgcctccatcggagaaaactgctctaagtgatacggctgaaaccgcatataaagatgcggcggcgttctgaagtattttctcccgatcggcgggcagggatcaaaccggctgtggaagggtttataggatttgaccggtgtaaacggctgattttctttcattacgatcctcctttcctcaacacatgaccttaataggtatgaatccgtatcggcatttatgccccgcaagaaatgaaaaaagccagcgcttagaaacggtcacaaaaaaacactcttgctgttccaagagtgctttttcccgaatggtcagatatattggctgtcccgatgatgatgatgatggaacggatagccgccgtagcctccgccatagccgccaaaaccgtaccccggatatcccccgaagcctccgtagccgccaaaaccgccgtaaccgccaaaaccgtatcccgggtaaccgtagcctccgccgaaaccgtatcccggatagccgccgtagccgccaaaaccgtaccccgggtagcctccgtagccgccatagcctccgccatagcctccgccgtaaatcggtcttctttcattcatgatttatcgctccttcacataggttacagtccagtttatgacatccggaaggaaacgtatgggcatccgcccagttttggcgaaataatcaataattgcttacggagaaaaatacgatacaggccgaccgcttaagcaaaataaaaaggccggaacttatgccgccccggcctttttgtctttattcgcctaaatctacattgtgataaacctgctgtacgtcttcgaggtcttccagcacatcgatcagcttttcaaattgagctttcgcatcttccggaagctcgacttcattttgcgcaagcatcgtcagctccgcaactgtgaactcttcaacgccggcatttttgaatgcctcctgcaccgcatggaattggtcaggctcggcatacacgatcacactgtcatcctcttctaaaatatcgcgcacgtccacatcagcttccatcagcaattccagcgcttcatccgccgtcttgccttcaacgccgataacggcagtcgcatcgaacatgtaagcgacagacccgctcacacccatatttccgccgtttttcccgaatgcggcgcgcacttcaggcgccgtgcggtttacattattcgttaacgcatcaacgatgatcattgaaccgttcggcccgaaaccttcgtaacgcaactcgtcaaagttctcctccgcgccgcctttcgccttttcaatcgcacgctcaataatatttttcggcacactgtacgtcttcgcgcgctcaagcaccacttttaacgcctggttcgattccggatctggctcgccttgttttgccgccacataaatctcacggccgaacttcgcgtaaatccggctcgtatttgcgtcctttgatgctttcttttctttaatattgttccacttacggcccattttgttccactctctttcacgaattgaatctgtatgataaatactctgcttctattatacctcagcggttgggttgtttcgagtgtaagacattagaaaaaacaggcacgcttaaaatcaccggagcgcagtaagccgaatgtgagggttattatacaaaacataaaaagcctcccttcatacaggaaggaagtcgcaagccaaaagattcattttattcttattacctattttctacactgtatatcctgacttacgtggtaaaattttgatatcgaacaaaagaaaggatatggtcatgaaagttttcgaagcaaacagcctacccaagaggtgaggtcaatgattgaaacaaatatttctgaacctgtatttcaatttttaggaggtattttccaccaagatatagacactcctgagtcagcacttgaagaatacttagaagaaatacctaaaaaagaacaagaaaacgatgtagtagcactcaaagcgtttataaaaagcgattactcagatgaacaaaaaaatgattttatagaagagactgcagatggtgtagatatcaatagttacggactatccccaatactatggctcggacaaatcattcaaaaaatcgaaaagaatattgaggctttatagattcagggaaaccctattcctatgtttgcacagtctctgataagtttcttaatctttccctctataaactgaaaaaataaccccgaatgaaaggatatggtcatgaaagttttcgaagcaaacagcttgttgacagctgccaaacagcgtgcgagtgaatacaaagaactgcgcggccagatggtcaatctaaaaaaagcgtttcaaggtatggctgacctcggtgacagcgacttttcaggccggggcgctgacaatatcaaagcctttttccaggaccacgccggcgtcacagacagctggcttgatctgatcgatatgaaaatcgcatttctcacaagcctttccggcaaagtcgaagacgcaggtctttccgaatctcatgtagaagaatcttttctggagcacgagctcacccatgccctcagtaaatcaaaggcgattatggaagcgcagaaaaaggacatgcgctccatcctcggagagatcgaagacatcatctcgctcgaattgttttcaaccgaaagcacagaacaaaagctttcttcagctgacaaaaaaagaagcgaaacgatacataaactcggcaaacttgatcacgatctaacgaaagaatacgcagaaaccgaagcaaatgaacattttatccaagcagatttccagcagcttcaaaacgcaacaggcaaaggaaaaagcgccacgccgcttcactacaatgccaaggcgtaccgagaaagcgacatccataagaaaaaagacgagattgcaagacattcggatgcttatttgacgattaaaaaggaagaagcgaaagagcgggagattgaaaaactgaaagaaagactgaaaaactacgattatgcgaatgccgatgaattctactcaatggccaaaacaatcggctataaaaacctgacaaaagaacagcagcgctacttcactcaaattgaaaacacgcgtgaacttacagacggtttcaaaggcgttgccgtcggcctttatgattccggaaaagacgcggtcacaggcctgtgggatatggtcacagatccgggcggaacggttgaagccattacaggagcggtggctcacccgatcaaaacgtatgaagccatttcagcggcaatcgaagaatcgtaccaaaaagacatggtgaatggcgacacctactccagagcaagatgggtgtcatatgcagtgggcaccgttgtgacatcagtcgtcggcacaaaaggcgtcggcgccgtctcaaaaacaggcacagccgccaaagtgacgaccaaagtcaaaacagcagcaagcaaatccgccacagcacaaaaagcgataacggtctcaaaacaaaccgttgatcacatcaaacaaaaagtaaacacaggcatcgaagtatcaaaaaaacgcgtcaaaaccaagttgaatcaaatcggagatctcaccctggctgatattctcccgtatcatccgcgtcacgacttagtgccggcgggcgtgccttacaacgcagtcaacggggtcacacttaaagaaggacttcagaaattcgccaaggtcatcctgccgaaaccgtacggaacctccgcaagcggcagacggacaccggcaccgcatgtaccgccggtaacagtcaaatacggcgagcattttgcgaaatggaccagaaagaaagtattgaagccgaatgtcatctacaaaacaaaagaaggctacacgtacaccactgacaactatggtagaattacaagtgtcaaagcagacttgcagctgggagaagcaaaacgcaaccaatatgcacagtcaaaagcaggtaaaccagaccgtctgacagatgacgacggaggccacctaatcgccacccaattcaaaggctcaggccaattcgacaacatcgtgccgatgaattctcagattaataggagcggcgggaagtggtacaaaatggagcaagtgtggtcaaaggcattaaacggaaaacctcctaagcaagtaaaagttaatatagaacccgtttatcagggagattcactaagacctgtattatttaatgttgaatataagataggtaatcgtagagcgagacaagttactatagaaaataaaccagggggttaatctaatggaaacaaaaaagatggaagttctatatcaaaagatagcagaacaaattaatgatatgatcccttccgaatggagcaaagttgttctttatgcagaaatattagacggctccagagaagtgtattttttctttcaaacaccagaaaacgatgaatatatatactctcacgacattccagaacaatttcaagtcagtaaaaaaatttatacagaactattattagatcttcaagagttatttaaacagttacacaatgaatttaaagaaaataatcccgaagcatggacaaatttgaccctgaagcttgaaagcactggaacgttctcaattaattatgattatgaagatgttattgaatctgatttggacgaatacgaaagacaaatgatttgggaattcaataacttggggattttccctgaagacgaagaggacaaagaatttgttaaggattatctaaatattaaataatgccatcaacaattcaaaggtagaggatcatcaatggaaactcaaaaaatgggtgaactatatcaaaagattgctgaacatctaaatgaaatgattccatctcaatgggaaaagatcgttttatatgctgaaatacttgatgactcagcggatatatacttttattttacaacaccaaataacagtgattatttattttctcattatatacctgaacattttgatgtgagcgaagagatttacgatcaactgctaattgaacttcaagagctatttgaagaactaaaagcagaatttaagctaggcaatcaagatatttggacaaatctcactttaaaattagaaaacaccggaaagttttcaattgattataatgatgatgatgttttatcctctgaacgtgatgaccttcaaagacgagatgtttggaaatatcaaaatttagggatattgcctgaagatgagaacgataaagaatttgtaataagctacttcggtctataaatcaataatggctcagcgcttctctgctgggctatttttgataactaagatttctcgacgattgaaggtgcaaagattggaaactaaaaaaatgcaagatttgtatcagcttattagtcagaaattaaatgacatcataccttgtgaatggacaaagatatatctttatgcagaagtattagatgattccacaatggttctttttcacttcagaacaccagaaaataatcaaattatttattcactagacatacctagccactacaacgtaagcaaggacattttcaagacgttgttaagagagctaagagaactttttgaagaattaagaactgaacacagaaataataacaatgatgtttggacgaaccttacactaacattggatcgtagcggagaattacaattagattataattatgatgatattttagcatcagaattagatggatatgaaagaatcgcaatatgggaatatcaaaacttggggattttgcctgaagatgaggacgataaagaatttgtaataagctacttcggtctataaatcaataatggcccagcgcttctctgctgggctattttttataactaggatctctcgacgattgagggtgaaaaagattggaaactaaaaaaatgcaagatttgtaccagcttattagtcagaaattaaatgacatcataccttgtgaatgggcaaaagtatatctttatgcagaagtattagatgactctaccatggtcctctttcacttcacgacaccagaaaaacatcaacttatttattcacaagatataccagcccgatacagtgtaaataaagatatcttcaacacttttcaagagaaatccgagaactctttagaattgagcacaaaaagaataatgataaacaaaacaggcagcatccagtaaacggatgctgcctgttacatcgttatgtatcgtctgaagaagtcatttattttgttttttaaatatgaaaatagatatgacggtaaatatgatggctgtaataacaatgatccacaagcttgctgccgtactgataaaatggccgtttaacttgtagacgatcccgtaatgcttttcatattcctgtatttggtccgcagaggcatatttaaatactttatcaactgagtctgtcataaacgcttttctgaacagaacggcggtgtggctgatagggaagtacataataatcttctgcacaaacaccggtacgccgccgatcggcacatatactccgcataaaaaaccgatggctgttccgacaatcgtacttaacgtcgaaaatgcattttgtgtatgaataaacagcgttaaaaataaatttatggaacttgagagtgcaactgaaagaataatgatccccaatacttcaagtatatctgtaccgcttaaaagcttgctgcctgttgaaacgagaaaaatttcacagcctaaaaaggagatgaaagaaaagatcaagccgatgacaaatgaatgaatgacatagctcaattggatggtcgcccttgataaaggagctgttaaaaagtcatacgttcttttactttctttatctttcaccataattccgaaagcgcctaaagtcgttgtcacagctgtaatggacagcaatcccgccaccacattcgttcaccattgctttggaatcatctgtcgaaccgaccaaggccttaatggcgtccagctgtgtctgctgtaagaacacggcatataacagaatgacgataaatactgacagcaaagaaagaagcaaaagtgttcgatcacggaagtatatttttatatttctgctgattaaactggataaagacttcatttatgcaatgctcccctttactggcaaactgcttccttgttcttcgataatatggataaacacatcatccatattccctttaatcacctcgaaagattcaatttttccttcaagacctttcaaaatgtcaaacgcttggagagtggactctacacgaagggaataaatagagtttttaaccgtaaaatccagttgtttattttcaaaccatgcagtcggatcaacgccttgcttaaacatcatatgcagactgtcaaacgcatattgatctttcagctgactcggtgtaccctctgcgatcagacgtccttctttgatgaccacaacgttatcagccacagcggcctcctccatgtaatgggtcgttaaaaagatcgtcatgtttgtttcttcctgcagccttttaatcgcattccaaacaaaaactctcgtttgcggatcaagacctgtagtaggctcatctaaaaataatatagtcggtttatggatgatggcacgggcaatatccgctcttcttctttgaccgcctgacaaatcgctgtattttttctccttaatatcatccaattttaaatagtctgttacaaactgatagttctcttgcacttgtgccttgcttaaatgataatattgtccgcggttcatgatattttcataaacggtcaatcgttcatccaaaatgctctcttgaaagacaaccccaatctttttgcggatatgattattctctttcccctcaccaagcgtataaccgtctattaccacttttccggatgtctttttaatcagcgtacagagaatatcgatagtggtcgatttccctgcaccgttcgttcccagaaatgcaaacagctcgccgcgtttgacagaaaaggatacccctttcactgcttcaaatgatccatattttttgcgcagatcggttactgtaataatgtcttgttcttctcccattctgttcacctcgaaaagtaagagtctataccgttgttcactaactttatatcgtcatttccgccaggattttctcatttttatccaactttattatctttttataaataattatcatgattataacaatataatttattattttcgcgttttgttattgggtttaggctcggtggattttctatacatagggatcacttattgattttgcatgaaacttatacatgctgtaatcaataaaccctttatcataaaaagggttttgttaagaatctctaatactattcaaaattcttgtttgtaaccgaaatacatattatcttagaatattcagaaaggagaacgtaatggaaacatgcccttattgtgcaacttcaattcaaaaggataatcagtattactgtagtttttgcttaatgtacatacataatgttcagagagatggcaaacgtgaaatcatagaatatcgtgagcatacttctgaattagatttggataagtctacaccagaactaatgactctgccaacaattgaattatttcatttactgcggctctcaagaaaaatacgcaaacagaagtatgatcagctatataaatctcgacttgaatcagaaaagggaaatgaatcagaaaatgttcaaatcgcaacggatagttaccaatattacacaaagaaaatgtatatcatagagaatatattaaataaacgtctgggttacattccggataggatagataatgtatttcttaagagttatttagaaaaagtaatgattagtaaggagaaaaaacaagatatgaaagtgtattaaaaaagctgcccctctagagtgaatattaataaagggttcctaaaaaggtaccctttattacataaagagatgtatagaaagctatattataggcgttagccaaacatcttctggtactcctctcatgtcacgagttcgtcctgaatgcaaaaaaatgcggattaaaaaaaggcaaccatccctaagggttagttgccttctcttaattccagcacagccacacactccacatgattcgtatgcggaaacatatccacaggctgcacttcgagcgtctgatacccgccatcctcaagcacccgcagatctcttgcaagcgttcctggattacaggacacgtacaccacccgcttcggtttcatgtcgatgattgtgcgcaacagcgcttcgtcgcagccttttcttggcgggtcgacgacgagggtgtcggccgtgatgccttcttcataccatttcggaatgacggtttctgcttctccgactgcgaattctgcgttcgtgatgccgttcagctcagcgttgcgttttgcatcctcaatggcttccggcacgatttcgacgccgtatactttcttcgcctgcttcgctaagaagagagaaatcgtgccgatgccgcagtaggcgtcgatgacggtttcttccccttgcagctccgcgtactcaagcgctctgtcgtagagcacttttgtctgttccgggttgacctgatagaacgatctggcggagatggcgaatttgacgtctccgatgaggtcgtagatgtattcttcgccccagatgacgtttgtttcgtccccaaagatgacgtttgttttatttgggttgatgttctgcacgattgatttgacgtgcgggaattgcgtcgtgatgtcttcgatgatcttcgctttgtgcgggaaatcgcttgttcttgtgatgaagacgatcatcatttcgcccgtgacgacgccgtatctgaccatgatgtggcggagccagcctttgtggcgttcttcgttgtaggctttgacgccgtatgaggcgcaaatatctttgacagcttgaacggcttcgtcgtttttggattgctggatcatgcaggcgctcatgtcaatgatgtcatggcttctttgctgatagaatccggcgacgagtccgccttcccgttctcctaccggcacctgcgctttgtttctgtagttccacgggtcttccatgccgagcgtcgggtgcacggtgacattggacaggtccagcttgccgatccgttctaagacgtctttgacttgtttctgtttaaacaagagctggccttcataggtcatgtgctgaagctggcagccgccgcattgtttgtagatcgggcatggggcatccgttctgtgcgggctttcttccttcagctcgattaagcggccgaaagcgaagccttttttgacgcgtgtcactttgatttgcgctttttcctcaggcagggcgttcggcacgaaaatcgggaagccctgaacctttgcgacgcccgctccttcgtgcgtcaaatcctcaaatgtcacatcatagtattcatttttttctatcgggggtttcattttcatctataatcacctctagttttaccaatagccttgtttcagcgtgctggcaaaccttcaaattcaatgtcagccttcaaaggtttccgatcacgctgaaaagatgacaaaatcctaaaacgaatactgttttaggattttgtccgcgtattaatcatccagctgttccgctttctccttcggcatgatgacgtgaatatgccggtacaggttcacgaattcgcccggcagcatgccgccgtactcgccgtccaggttcagctgcatcttttctgatacattgactttcacacggttcgcttttgtgtaaataatgtgctgatcgttaatatgatcgcctctgagcgccatgctcgcgactctgataaactccgcgagattggcttttttcaaaataattaaatcaaacatgccgtcattcaggctggaatcaggggccagcttctcgaatccgccgaccgagttggtcagcgtcactaaaaacagcataatttcgccttgaaacagcttgccgtcatattcaatctcgacttctgtcggtcgaagtgaaggcagcatttccattccctttaaataataagcaagctggccgagcatcgttttcagtttgctcggcacatcatacgtcagctccgtcagacggcctccgccggcgatgttgataaaatactgaccgttcacctgtccgatgtcgatcgggcgggctacgccgttaatgacggtatcagcggcattcagtatattctctctcggaatgcccagcgctctggcgaagtcatttgtcgtgccgaccggaatgatgccgagtgtcgggcgtttgtctaacggcgcaaggccgttgacgacttcattaatcgttccgtctccgccggctgcgataatcaagtcaaactcccgcaaagcggcttcttttgcggcgttggtggcatcccccgcgcatgtggtggcatgggtggaggtttcataaccggcttgttcaaatttttgcaggacctgggcaagatttttcttaaaaagctcccgtcctgaagtcggattgtatattatgcgtgcacgtttcattatctcatcatcctacttaagagtatccgatccattattaacactaacaacctttaattatactatgacttgagaaaatcgcaacaatatgtacaggaattgccagaagaaaaaaggccccggctccgtttaaggagccaaggcccgctgtcttactcttcttccgttccaggttttttcttacggaatttcgctaatacttcatatacgatcggcacaatcagaagggtaagcagagtcgaactgattaaaccgccgataacggtgacaccgagtcctttagaaatgacctggctgccgccttcgaagcccaatgccaatggaagcagggcgccgattgtcgcgatcgccgtcatcagaatcggacgcaatctcgtagagccggcttccaggagcgcttctctcgtcgataagccttccgcttctttatggatgacgcggtcaattaagacaatcgcatttgtgacgacgattccgatcagcatcagcataccgatcatggcattcagactgatcgtctctccggatacatacaggccggctaatgcgccgatgactgtaaacggaagcgagaacagaatcgcaaacggcgctaatgctccgccgaacgtgatcacaagaacgaggtatacgatggcgattgcggcaagcatcgctaacccgagtttcgtaaaggaatcagcaatatccgctgatacaccgccggtatcaatggatacattgtccggcttatccagtttgtccactttcttttgaacggctgatgacaccttcgtgacgttgtcagaagtgacggttgccgttacgtcagcgtacactttgccgtcgcgtttggaaatggtatcggatgtcgtgccatttttcactttcgccacatcgccgatttttacttcttggcctgcaggcgatgtgatggttttatcctctaattcttttacactcttatactggtctttttctgttttgatgttgacgtcaagctctttgccgtcctttttcaccgttgtcaaaggagactgtgacgtttgggacatcagggcttgggagatttgcgaagccgtcaggccctgcttgctgagtttctcctggtcagcggtgaacgtgtactcatcatatgtgctggaaaggcctgagttgatgtctttcagatctttctgctttttcatgatgccttcgatgtctttgaccgtgcctttaatatcagactctgaatctccgtacacatagtacgttaattcgttgttgttgcctgacgaactgaaattttgtgatttccattcgccgcggctggatgtttttttgatttcttttaagacattgtctttttctttgtcaaaatcaggcgtgtcatcctcgtatttcacgtagaacaatgcgccgtttgagcttccgccgagcggactttgcgagcctaatgaatactgaacggtatcgacatgtttgcgtttaagcagcatgtcttccgctttttgcgcagctttttcagcttcgcttttcgtttcgcccggttcaggcgtgtatgtgagctgcatcgttttgtccgcttgcgcaggcaggtagctcgcgccgatcagaggtacgaggaataaactgccgacaagcatcagaaccgcgatgatagatgtaatccatttatgtcttaatgaccaattcagcacttttttatagaaattggccaatctgcccggcttatgctctttcgctttaacaggcgcgcctgtgagcgattttttgaataagctgtgcgcaagcatcggcaccagtgtgatcgaaatcaacagcgatgcggcaagcgcgaagacgattgttaatgcaaacggcataaacagttcgccgatctgtccgccgaccatggcaagcggcaggaatacggcaatggttacgatcgttgatgacatgatcggtttaaacatttctttcgtcgcttcacgcaccaattgcttcccgcgtaaaggttcatctttcagcctcatgcggcggtaaatgttttcgatcacgacaatcgagtcgtcgactacccgtccgatggcgaccgtcattgcaccgagcgtcattatgttcaatgtgacatcaagctgattcagcacaagaagcgcaatcagcagtgacagcgggatggaaatgatagaaatcatcgttgatttaatatctcttaagaataagagaatgatcacgaccgcaaaaatcgcgccgaaaatcgctttgcttaacatcgtatccaccgactctgtaatcggctctgccatatcaagagtcgagctgtacttgaaccctttgtggtcttttttgtattgattcagttcatctttaatcgcatcggccacttctaccgtgttggcgtcattggcttttacgatattaattccgatgctgtcctttccgttcgtgcgggaaatggattcagcttttttcacatctttaatgtcggcaatgtcagaaagcttgactgtcggcacccctgctgccgcgctttgctgtgcctgctgcatagcctgagcgtccgccgcagatgccgcaccggctccgcccgcttgaccttgagcggcagaagaagatgtgaccggaattctcatatctttcagatctttaattgacgtaatatttccgttaacgacaactgatttttctttgttgccgaatgtgtacaatccaagcggcgtattgacgtcagagccttggatcactttcttgacggtatcttcatcaagtccgtactctttcatttttttgtctttgaaagagaattccacctgctcttcctgctgtccggaaacttgcacggacgcaacgccctgaatgccttcaagcttaggaacgagagtgttttccacatttttggtcaggtcttcaagcgagcttttgccgcttgtcacactgagcgtcaaaatcgggaaagagttgaggctgtaacgggaaatgtcaggttttttcacgtcgtcaggaaggctgacactgtccagcgcttcagcgacttcggttttcgccttgtccatatccttgctgtaatcatattcaatcataaccgatgagacgttttcagaggatgtggacgttacgacgctcactccttctaaattctgcaccgcctgctcgatcggttttgtcacgtcatccgcaacttgactcggagcagctccgggataagtcgtatttactgaaaggtaaggcatgttgacgtccggtatggattcctgcttcatattcataccggcatacagccctgctacagtaacgataatcgtcatcagccaaactgcgaatttgttcttcagtacaaagttaataatgtggttcatcatgtcctccgttaatttttattgactgactggtcattctatataatactaaacggtataactcaacatcgtcaactaataaggcagtaaatttttctaaatttttcaggattaaggggaagcacgtcatgaacgaaaaaaaagagaaaatcataaaaacaggcatccatttatttgccaaaaaagggttttcttcaacaaccattcaggaaatcgccggtgaatgcggaatttcaaaaggagccttctatctccatttcaaatcaaaagaagaccttttgctgtcagcatgtgagtattacatcggcatgtccatggaagaaataaagaaaatcaaaacagaacatcagcataaaccgcctaaggacgtatttcgaaaacaaatcgcttatcaattccaggaatttatggagcacaaggactttatcattctcttgctgagcgaaaaggtcattcctgaaaatcaaaaggtcaagcagtattttcatgaggccaatattcaatttaacatgctgtatcgggatgcgttgctctccgtttacggagatgccgtcacaccgtttttagcggacgcgtccgttatggcgcaaggaattgtgagctcctatattcatttcttgatttttaatgaacatacggcattccggacggaaaacgtggcggcctttctgattgccagaatcgatgatctgattacgggactgataaaagacaatcccgatccgctgctgcctgaggatatcttcactcagcccgcggcggatagagaaagactgcttgcggatattcaaaagataaaagcacagcaggggctgcctgaggacgtcctcgtatcgcttgaagtcattgaagaggaatgcgcaaaggaagagccgcgaaaaccgattattaaaggaatgctgtccaacttggcaggcagcggaaatgagcagattgaaacgctgcgggcttccattgaaacctatttcagcttataaaaaaaagagaccggcgcttaccggtctccgtgtcagcagcgcccttagaggcggctgctttttttatcgttttttgatttcttcaagtaagatcttgttgaccatcggcgggttggcctgtccttttgaggctttcataatctgcccgacaaggaagccgatcgcgcggtcttttccgtttttgaagtcttcaattgactgcgggttgctgtcaagcgcatctgttaccagcttcagaagcacgctttcgtcagaaatctgcacgaggcctttttctttgacgattttttctgcgtcgccgcctttttcaattaattctttaaagactttcttcgcgattttggacgagatggttcctttttcaatcagcttaatcatgccggcaaggccttcaggagtcagcgcgacatcctcaagctctttttgttcggcgttcaggtaagctgagacttcacccatcagccagtttgatgcctgcttggcttctgcgcttttattgaccgtttcttcgaagaaatcagccatttctttcgtcagcgtcagaaccattgcgtcataagcaggcaggccgagctcttcgatataacgcttgcggcgctcgtccggaagctcaggaatggttgctcttacgcgttctttccattcgtcatcaatgtagagctcgacaaggtcaggctcagggaaataacgatagtcgtccgaaccttctttgacacgcatcaaaatggtttttttcgtcgcttcatcgtagcgtcgcgtctcctgctgaatgactccgcctgacagaagcacctgctcttggcgtttttcttcatgctcaagtcctttttgcacgaacgcgaaggagttcaggtttttcagctccgtttttgtgccgaatttctcctggccgatcggacggagggaaatgttggcgtcacaacgcagtgaaccttcttccattttacagtcggaaacacctgtgtattgaataattgatttcagcttttcgagatatgcgtaagcttcctccggtgtgcggatatccggctcagatacaatctcgacaagcggcgtgccctggcggttgaagtcaacgagggaatagccgtcgcccgtatgcgtcagttttcccgcatcttcttcaaggtgaagacgggtaatgccgatttttttcgtttttccgccgacttcgatttcgatccagccgttttcgccgatcggcttgtcaaattgagaaatttgatatgccttcgggttgtccggatagaaatagtttttccggtcaaacttcgtatccgttgcgatttcacagttcaaagccattgcggctttcatcgcgaattcaaccgcttctttgttcaaaacgggcagcacgccgggatagccgaggtcgatgacgctcgtttgggtattcgcttccgcgccgaatggcgtcggtgagcttgagaaaattttagattttgtttttaattccacatggacttcaagtccgattaccgtttcaaagttcacttcatttcaccccttacagttcaggtttcgctttatgatgatctgttgcctgctcaaaagcatgagcgacgcggtatacagtgccttcatcgaagtgttttccgatgatttgcagtccgagcggcagtccgtccgcaaatccgcacggcacgctgattcccggcacacccgcgaggttgacagggatcgttaaaatatcgttggcgtacattgtgagcggatcgctggttttttcgccgattttgaatgccggtgtcggcgttgtcggtccgacgatgacatcgtatttctcaaatacgtcttcaaaatctttcttaataagcgtgcgcactttttgcgcttttttgtaatacgcgtcatagtagccggagctgagcgcgaaggtcccgagcatgatgcggcgcttcacttcgttgccgaagccttctgagcgtgtctgtttataaaggtcgatcaggttgtccgcattgtctgagcggtatccgtagcggatgccgtcaaagcgcgcaaggttcgcagacgcttcggaagatgacagcagataatacgtcgcaagcgcgtatttgctgtgcggcagagatacttcttcccatgtcgctccgaggtcttcaagcacttttaaagcggctaaaaccgattctttcgcttctttgccgacgccttctccgagatattctttcggtacggcgatttttaagcctttaatatcgccagttaatgaagaaagaaagtccggcacttcgacattggcgctcgtagagtccattttgtccgggcctgaaatcgcctgaagcaggaatgcgttatcttctacggttcttgtgatcggtccgatctggtccagtgaagacgcaaaagcgaccaaaccgtaacgcgacacgcgtccgtatgtaggctttaatccgacgacgccgcagaaagaagccggctggcggatggagccgcccgtatcagatccgagtgaaaacggcacttcgcccgcggcaaccgccgctgcggaaccgccgcttgatccgccgggaaccgtatcgagattccaagggtttttcgtcgctttgtacgcggagttttcagtagaagaacccatcgcgaactcatccatattcagctttccgatcgtgacggcttcagcggcttgaaggcgctccacaaccgtcgcatcgtaaatcggatcgaagttttcgaggattttgcttgagcatgttgtgcgaagccctttggtcacgatgttgtccttgacgccgatcggcattccgaagagaagaccgtgttcagaccgtccgtcaaccgcttcgtcaagttctttcgcgtaagcgcgggctctttcttcatcaagctgtaaaaacgcctgcaccttatcatccacggatgcgatccgtttgtaagattcatcaacaagatcggaaatcttgatttcttttttatgtatcatttgtttcagttctgtgattttgtgatcaaataatgacatactgtctccctcctttaatccagaatagatggcacacggacatagccgtctttatgatcgggagcatttttcatgacatcctcgaccggaaggcctttacccgcttcatcttctctcattacgtttttcattttcagcacgtgtgttgtcggttccacgttatccgtgtccacttcattaagctcctcggcaaacgagatgatgctgtcaagctgttctgtgaacatttcagcttcttcatccgtaatggcgagtctcgccaaatgagcgacatgctttacttcttctatagaaattcgtgacataagatccacctccgcataattctccgtttcgtcatataatactgatcatatcaaaaacgagccctctaaagcaacaaaacgccgccttctgaggcatgatgaaaccctctctattttatcctaaatcggggagaaagagaaacgaattatatgtcagaaaatttttacttttataatttattggtagcgttttcatctttaagctgttctatgctgccggggattttttccttgaatgggccaggtttcgagagttgattgatcggggatactttgttaggtttagtaaccatagcctgcacaaaatcatgcattcagcatgtcatgatgactaaaggcttgccgccggcgcaaaagtccggcactactaatctgcagaggtgatgcaacatttacttaaaagaagagagggtccagaaacgtgagtattgaattaattatatctcttggcatttactttgctgccatgctgttaatcggctggtacgcattcaggaagacaacgaatattaatgattacatgctgggcggaagaggactcggcccgttcgtaacggcgctgtccgcaggtgcggccgatatgagcgcatggatgctgatgggagttcccggcgcaatgttcgcaacggggttatcgaccttatggctggcgctcggtttgacgatcggcgcgtattcaaattatctgctgcttgctccgaggctgcgcgcttacacggaagttgcggatgatgcgattacgattcccgattttttcgataaacggttccgccactcgtcatcattgctgaaaattgtttccgccgtgattattatgatctttttcacactgtacacatcgtccgggatggtatccggaggcaggttatttgaatcggcattcggcgccgactacaaattcggtttgtttttaacggcctgtgttgttgtgctttacacgctgtttggcggtttcctcgctgtcagtctgactgactttgtacagggagcgatcatgtttgcggcattagtgcttgtgccgatcgttgcttttacccagctcgggagcgtttcaacgacgattgattcgatcaacgccgttaacccgaaactattggatatctttaaaggcgcgagcgtcattagcattatttcttatttggcatggggactcggctattacggccagcctcatatcatcgtacgatttatggcgattaaagaagtgaaagatttaaaacccgcccgcagaatcgggatgagctggatgtttatttcagttgtcggctcattgctgaccgggattatcggggttgcgtattctcatcacttcggggtctccgtaaaagatccggaaacgattttcattattttttctaaaatcttgttccatccgctgattacgggcttcttgctgtccgcgattttagcggcgatcatgagttccatttcctcacagcttctcgtaacggcaagcgccattacggaagatttataccgcgcctttttcagacgggaagcgagcgataaagaattggtcatgaccggacgcctgtcggtattgatcgtggccgttatcgccattttgctttccatgaatccgaacagcaccattcttgatctggtcggatatgcgtgggcaggcttcggttcggctatcggcccggcgctcttgctcagtctgtactggaaacggatgaatgaatggggagcgcttgcggcgatgattaccggggccgcggccgttttaatctggatcacgacagggcttgccgcttcaaccggcgtatacgaaatcattccggggttcttcctcagtctgattgccggtattgccgtcagcctgctgaccaaaaaaccggccgatgcttcttatcagctgttcagccggatggaagctcttttgaaaaacaagaaatagacaaaaagccgtcagattttatccctgacggcttttttcttccgcacttgtcctgctataaatactgtgagaaaatcatatcaatttattataagaaaaattgcggaggtgctgtgcaaattgagctggcctatcgaaccagacattttattaaagctgggcattgccacgctgatcggcatgatcatcggtcttgaacgcgagctgaaaaacaaaccgctcggactgaaaacctgtatcgtcatcgccgtcagctcctgtatgctgacgatcgtcagcattaatgcggcatatcatttcccaaaatattaccgaatcatgatggatccgctccgccttcccgcccaaatcatttccggcgtcggttttatcggcgcgggcgtgatcctgcgtaaaagcaatgacgtcatatccggcctgacgacatcggctatcatctggggcgcagccgggctcggtctggctacaggcgccggcttttataaagaggcgttcgcaagcctcttgtttatcctgatcagtgtcgaatttcttccgtggctgatcagaaaaatcggtcccaaccgcttgaaggaaaaagatatccgcgtgagaatgtctctttccgataaagacaaaatgaccgagattttaaaggaaatgaaaagcaaacagctccgcattcactccgtccggattgatgatctgggtgaaaaagaatttccgattatggaagtgaaagtcagtgttcataaaaaccgctacaccactgacgtctattatgatattaaagaaattcagggtgtcgtcggagtgaagtgtgatacgctataaaaaaacgccgggctggattcagccggcgtttttctatttatacgaatgcagaaaagttatactccgtaatcggggtttcattttcgatatcgcgcctgaaggttttcagcatctcaagttcctcgtccccgagtgaattgaggtcaaacgcctgatgcaataatccgtagatcagcatatggcgcagccggaggaaatccgggatgtgttcaagccatgcaggatcaaggtcattttcttccctgtagcctttcataaagtgagtcatgaattcacccgtaaacgcggccttgtcttcatacgggatgaccggataccacaacatgttgtacagcagaatactgatatcattcacaaaccaattgtagccgatatcatcaaaatcaaatgcagtgatttttccattgtcccaattgaaattgccgtggtgcagatcggcgtgcacaaggccgtagttttcagggttcttcggcaaacggcgcagtttttccattagagcatccgcccgctcaaatacgagatgctgatctgcgggcacgtattttctcagcttcagctgctcctcttcatcccattcctgccttttatataacggatcgctcagacggtagcttttcgtcagccggtgcatgttccccgtgtactttccaagctcgtaaaacagggttccgttccagtctgattcctccactttgcgtccgggcgctttttcatagactcttactaaaaacgctccgccttttccatccggcacttcttcgacatctttgccatttaatgagggaatcggctttgctgctgaaagccctccctttgccagatgatgaagccattccatttctccgagaatatattccggtgttcttctgatcgtatgcgtaatttttaaaatataaggttcgttatctttcacaatttcatatacgtagttctcggcgtccgcaataaattgaaacttggtaaagccgtatatttcacctgcttcagcgagcaccttatcttcctcaaaaatcgctttaatatctttatgcatgctgattcacccttttcataacgtttgtaggcggtgtgtgtactcagcaaatgtcattcatcaacattcctgcccttcttttttcacagcagattagtaacatccgcttagaaatgaaatgtgttttcctattaattcctaattatacaaatatcttaacatacctcattcctcgctccaacgatatcacaataaaaaaacccttgctcatacagaaatgaacaagggcatcttggttaatcgtaaatatggacggtcggttctttgtcacccgcattgcggacgatcagcgcttcctgcccgtcagacgaggtaatgttaatttcgacatcaactgaaccttttgaataataatccatcagctcacctgttaagtattgggtaaaggcgatgacttcgcttttcccgtaaaattgcatcgggatttcaatcttcatttttctcatttcatcgttttcgtacattgccgttccgacgactccggtgtaattcgggaagtagctgtcgatggcgtttttgaagcgtttaaatacttcggaatcatcagggtatttctttgccgtgtctgtatccgccggatagaagacgtacttttctttgacatcatcccagtttgaaatggtggatgagccggccttgacttctgtttttgcaatgtaattccccggtacgattgatgttttcggcgcttgtttataaagggcgacggtaatcggcacatttttcaggttatccattttccgaaggcggttaacgacttcctgggcgatttcttcaccgtggctgcggatcgttttgtcactgagctccacttcctgctgcggatcacctgtattttcacggtaatagtatacagagttgagagcgagaccgatcatgataccgccaagctggatggaatttttatcttttcttactaagtaatcctgctcaagcatggacgctaagtaaatcgggctgttttcatttttctcttttgccgatcccgagcttggcagcacggggtttaagccgagattctgaaaattggcgtctgcctttttcgcctttttcagatcactgccttcttttttgcggtcaagccagctgagtaccgtgtcctcatctaaatactggccttcctgatacaaatagtcatccgtcgggaacgtgtcttgagcgagccgcatcagacccgtctcgaattcatcgatgtccagcctcgtgttcagccggtccgcggtcaggccgcgcgcttttccggccttaaacggaagcaccattttatagtaggaatcagagatattatatttcggtatgatcgctttttcagaggactttgccgttttctgcgtgatctcttcctctttgttccccccgaaactcggcgaacaggccgacagcatgagtactgccgccgttgccgtcgccgccaatgccaacatctttttcaatagaaaacactcctcttatttctttagctctcccaatagctgtgcttcattccatacttcaatgtttaattcctgcgcttttgtcagcttgcttccggccgcttctccggcaatcagcaagtctgtttttttgctgacagatcccgtcagctttccgccgagcgcttcaatctgcgccttggcttcatttctggacagctcttcaagctttccggttaacacgatggttttgccggcaaaataagagtcgctgtcctccacttttacttttttcgggcctttgtagagtgtgttcacaccgagttcctcaagttcattcaatagctcaagcatttcttctttgcggaaataggtgataacggcatcggccatcttttcgccgatttcatccaccgcaagcagctcttcttccgtagcttgtttcagattttccaggctttcaaaatgcatggcgagtgttttggccgcttttgagccgataaaacggatgccgagaccgaacagcaggcgttccagcgaattctctttcgacttttggatggagctgatcagattgtcagttgatttttcccccatccgctcaagccggatgacctgctctttcgtcagcttatacaaatcagcgacattacggacgagatgttcacggaaaagctgtgtgatgacacgttctccgagtccgtcaatattcatcgcgttgcgtgagacaaagtgaatcaggccttctctgatctgcgccggacattccggattgatgcagcgcagcgcgacttctccttcaatgcggacaagttcgctttcgcactcagggcagctggtcggcatattgaattctttttcttccccggtccgctgttcgattaagacattgacgacctcagggatgatgtcacccgcttttttgacgaccactttatcgagaatgcggatatccttctctttaattaaatcttcgttgtgaagggatgctcttgagaccgtcgttcccgcgacttttaccggttccagaacggcggtcggcgtaatgacgcccgttcttccgacattcagttcgatatcgagaagttttgtcacgacctcttccgccgggaatttataagcaatcgcccagcgcgggctttttgccgtatacccgagctcttcctgctggtcgagcgaatcgactttgatgacgattccgtcaatttcatacgggagatcggcccgcttcgcctgcagctcttcgatcatttcaatgacttcatctatcgtggcgcattttttccgttcctggtttgttttaaaaccgagctcatccagaaaatccaggccctgactctgtgtttccacacccatttcgtcaagctccgctatactgtagacgaagatgtcaagatttcgtttcgctgcaattttcggatcgagctgtctgagtgagcccgcagccgcgttccggggattggcgaacggctcctcttcatgtttcagcctttcttcattgagcgcttcaaatgactgtttcggcatgtacgcctctccgcgcacttctatagaaagattccgtttcattttcagcggaatgttgcggatcgtttttaagttttccgtgatatcttcgcccgtcgttccgtctcctcttgtcgcgcctctgacgaaatagccgtcttcataacggagagaaacagcaagaccgtctattttcagctccacattataagcgacgccgtcaccgacagcctgacggacgcggcggtcaaaatcgcggaggtcatcatcgttaaatgcgttgccgagactgagcatcggcgtgccgtgctgcaccttttgaaacgattcaagcaccgctcccccgacccgctgtgtgggcgaatcaggcgttctgagctccgggtgctcttcctctatggcaatcagctcctgcatcagtctgtcgtactcggaatccggcacgctcggttcatctaaggtgtaatattcataactgtactgatcgatggtgcggcgcaattcttctgcccggtgtttcgctgtttctttgtccatcatgttcttcctttcctcttcaggttactgcttttcaatcggcgcaaaagcggcaagcagacgcttcacgccgactgggctcgggaatgcgatatcaagctcggtgctttcgccttctccttttacgctgacaaccgttccggtgccccattttttatggcccgctttatcgccgaccgcccagctgagcgagtcgccgcctgttttgttcgcataggaaacgggacgggatacgggcccgcgttttggctgcacttttcttcccggctgcatgcgaggtgttttcttctcatttaggttctccaataaatcgccaggtatttccctgataaagcgggattccggattcatattggtgcggccgaataaggtgcgcattttggcattcgttaaatacagttcttcttccgccctcgtaatgcctacatatgcgagcctgcgttcttcttccatctcggcttcttccatcagggagcggctgtgcgggaacacgccttcttccatgcccattaagaacacgacaggaaattcaagccccttagcggcgtgcagtgtcattaaagtgacggcatcctttccgcctgattcttcttccttctggtcgagctggtcaatatccgcaatcagcgctaaatcagtcagaaacgcgacgagagacttgtcttcgcttttttgttcgaagtttttcgtcacggaaagaaactcgtcgatattttcaaggcggctttgggcttcgattgatttttcggccttcagcatttctctgtattccgttttctcgagaatttcttctgtgagttccgtaatagacaggtaatcctgcatgttcgtcagattttcaatcatcgcgccaaagccgtcaagcgcgtttgccgctttcgcgctgacgccgatgaaatcaacctgtttgatcgcctggaacattgacattccgttcatcgccgcatatgaagcgattttttctagtgaagtggcgccgacgccccgcttcggcacattgacgatccgcgtaaaactgatgtcgtcgtccgggtttgacacaaggcgcaggtatgcgagaatgtctttaatttctttcctgtcgtagaacttggttccgccgacgatattgtagttcagtccggattttaaaagggtttcctcaatgacgcgcgactgggcgtttgtccggtataaaatcgcgatatcggaaagcttccgccgccccgagctgtgcagctcattaattttgcccgcgacgaattggccttcgccgaattcattgtcgccgctgtaataagaaagcttgatgccttcgtcattttccgtccacaggtttttcggcttgcggtttgagttgtttttgatcacttcgttagccgcttgcagaatccgctttgttgagcggtagttttgctcgagcagaatgacgtttgcgctcggataatctttttcaaaggaaaggatattcgcgatatccgccccccgccatctgtaaatggactggtcggagtcaccgacgacgcagatattttcaagacgggccgcaagctgcttcacaagcaggtattgcgccctgttcgtatcctgatactcgtctacgtgaatgtattggaatttgcgctgataaaactcaagcacttccggcacacgctcgaaaagcttaatcgtcgtcatgattaaatcatcaaaatcgagcgattggtttttcagcagttttttctggtaatcggtatacacgtcactcgtgacctgatcgtagtagccgccggccgtttttgcgaattcctcaggttcgatcagctcgttttttgcgctgctgatggagcctaaaatacttctcggatcaaactttttcggatcgatattccgctctttcagaatccctttaataacggaaagctgatcagccgtatcaagaatggaaaaatttcggttgatgccgattctgtcaatatccctgcgcagaatccgcacgcacatgctgtggaaagtggatatccagatttcatccgcgccgggtccgagaatgctctctacccgctccttcatttctctggcggctttatttgtaaatgtaatcgccagaatgttccatggcgccacgtgtttttccgccattaagtatgcgattctgtgcgtcagcacacgtgtttttccgcttcccgcgcccgccatcagaagcagcggaccgtccgtcgtcttgaccgcttcctgctgaacgggatttaatccgcttaataattgattgctaatgtaattcatatccgttcaccgcctatcaaacatatgttctatcataaatcaatttcgtccgcttggctactttgtctttacagccgccaccgttttaagcgcctgatcaaaatcttcatatacggcatttccgacaacgatgacatcggcatgacggccgaaccgttccgccgtttccgcgtctttaatgccgcctccgtaaaacaggacggacttgtccagcacagccttcgttttctccaccgtttctatgtccgccagcatcccgctgtattccagataaaaaatcgggagatgaagcaaatgctccgcgacccgcgcataggcgagaatatcttctgtttctatatgtgtatccgcctccgtcaaagcggccgccttacaatcagggttgacgatgcagtagccctccgtcacgatttcctccattgacatgagctctccgtattctttcatcgcctgatgatgcatgccgacaatccagtccgcctttttgctgttgagcacactcggaatgaaataaagatcaaacccgggcacaatggaatcaatcgtcgacacctcaagtacgcacggcactaaaaaccgccgcacctttgacatcagtctcagcacattgtcctcggtgatattgtcgcttcctccgatcacaatggcgtcagtccctgattcacaaagccgttccagttgttcatccggtaaatctttattcggatcgagtttaaaaacatgcttccactcgttaacatcgtacatgcgttttcgttcctccattcgtttcttgccatttaaacattataacaaattcgtttggcccggaaaaacggaaaaagacgtcattcacctgattcacaaaaaaagattgcgctccgccggacgggaaacggctatgtttgaaaacagacaatatgtggaatgtcaaagagaaaaaagacaaggagtctgatctcaatggaacaagccattatcgtactgatttgtatattgatttttattattttagttcccgccgcattgtttctctggatatacataagagacgaaaagcaggaagaacattcagtgctgcgcaattatcccgtagcgggaaaactgcgctacatatttgaaaaaatcggacctgagctgcggcagtatttattcagcaatgataacgaagaacagccgttttcccggagagaatatgaacagacggtcatgtcgggaaagtataagagcagaatgatgggcttcggctcagaacgggatttcaatcagtcgggctattatatccgtaacgccctcttcccgaaacaaagggaggagctgcgcgcagatcagacgccgaagatcgacacgatagtatacaagattgacaaagacaacctgctgaaacgcagcgaacaccgcgaaaaggcaaaagcggacccttattacctgcatccggacgatgtgcaagtgatcggccgcgacacatgcaagaagccgttttatgtgaaagggttaatcggacaatcagcgatgagctacggctcacttggcgacagggcaatcaccgccctgtcaaaagggctgcaccaggccggcggcacatggatgaatacaggcgaaggcggcctgtctgagtatcacctgaaaggcggcgcggatattatctgccaaatcggccccgggctgttcggcgtgcgcactgaagatggagaattttcatgggaagaatttaagaaaaaaagccgcctcaagcagattaaagcctttgaattaaagcttgcgcaaggggcgaaagcaagaggcgggcatattgacggttcaaaggtgaccgaagaaattgccgccatcagaaatgtgcagcccggacaatccattgacagcccaaaccgattcaacgagttctcaaatgttccggacatgcttgatttcattgagaaattaaggactgtcggtgaaaaaccggtcggcatcaaaattgtcccgggcagccgcaaagaccttgaagaccttatttcctatatgagttcatcaggcaaacttcccgactttattacgattgacggcagtgaagggggaacgggagcttctttccatgagctggcggattccgtcggcctgccgattctgaccggcctcccccttgttgacggccttttgaagacatacgggataagagataagctgaaaattttcgcatccggaaagctgctcactccggataagattgccgttgccctcgcgttaggcgcggattttgtcaatattgcccggggaatgatgttttcagtcggctgtatccgcgctcaagtatgccacaccaatcattgtcctgtcggagtggcgacaaccgacccaaaacttcagcgcgcgctcagtatcgaggataaacagcaccgcgtctgcaactacgtgctctcattgcgtgaagggctgtttcacctcgccgcggcggcgggcatcagctcaccgattcatttttcagctgaacacatcgtataccgggaggaagacggaagcctgagggaacttcccggccttttgaatcagcacgcataaaaaaaaccgcctgccgtcatcggcagagcggttttttacgtagctgaggaggattctcctttgtttacgcggtcaagcgccatttcataggcgtcgttaccgtaatttaagcatctcttcacccgggaaatcgtcgctgtggaagcacccgtttcgctttcaattttgtgatacgtatttccttcgcggagcattcttgccacttccaaacgctgcgccagcgattggatttcattaatcgtacaaagatcgtcaaagaaacgatagcattcctccagatctttcagcgataaaatagataaaaataactggtccagttcttttccgcgtaatttatcgatttgcatcgtcaaacaccttctcctttactaatggaagctgcatcgagatcaggcacgatattaatccatgtctttcctggcacaaacggaagaatctcaccgccttttacgggcagaatacggccgtctttatattcccagtctgactctataacatcgccgtgctgaagcaggaggcccttcccccctgactgaatatcgatggcccgccttccatctttgtctgtcatgcgatggccggcttcaacaataaaaatgttgtgcatggctaaaggctttccggtctcccggtctgtcgctttcacaccatcagagcttcttgtataagcatcagcttttttatcataatcgtattcgacaagatttgtaatgttttgtgttccataatctatccgaatattgtaggtttcatttcctggttttgcatctgatgtctgaaatgggagcggttctgtttttccgttcagcttgtatcctttttgttccgccgccttcctgatattgtcatacgacgtgtaggaattgtggggcggcttgctgaaatcggctctccaaaacaggcttccgtcaaaatccaaaccgtttatataatcgtaagctccggactccagctgcttttttgcgccgggactccagccatgatggacaaatatgctgttaaacccgctgctgagcgtgacaaaatattccctcgcgctccgcacaggcccgaccgtttccggcatctcactttgaaaaatcgcgagaaaccgcgtaatccggccctccgcgagcgcttcgatgacaacatccgcctttgacagcccggattggggcctcgccttcggatgattgttcactgcgactgcaatcggacggcgttctgcaagcttctgctcagttttcagccccgttaaaggagcttccgcttctttcggctgcacctgatcggcattattctgccggcaggcggcaagcagcaaaaacgcaaaacaaagcatacaaacggttttccatcttttcatatgtcggctccctgcttttatattttaacgcattatcgatggaaagagtacagtttttttcatcacgtcgaatattcctctcggcgtaatgcggatataaggcaggtgtgtgctctgcaaaaagagcagcgtatagatcggatcgcagaatcggtagccccgctcctccagcagcgtcctcagtttttgctctttctcaagcacttcttcatacttctccgcggatgcagaaccgtttaaggcgaggggaatctcatgcagaatcttcccgttttcggcaagcacgattccgccgccgatttctttcatccgtgagaaagcgagcaggatatcttctttattttttccggcagcgataatatctccggttgtcgtgtaggaactgacaaagccctgcacccgatcggcaaaacctttcagcattgtattgacccgccattttccatgcttatcgagaagcgtgagatagcattcatcatgatcaaaagaaagctggtcaacagaattatcaatcgcaatcatatacggctccataatgaccgcgttgcgcatcgtcacacccatcggcattgaaaactgtaaatcatccatcgtcatatcatatgaaagctcaagagggacaagaccgccctttttccaatccgtttctgtaaacgcattcatatttcggccgtcttccctcagcaggatgcctttggagatcaccgtgaccgggtccggattcatcgggtcatcgagaatgttcaatgaagcaagccgtcccggaccgaccacaccgagatagtcgtccatctgataatacttcgcgatattaaaggaggccatattataggcatcgatcgccggaactccttcctccaaagcgattttgattaattcattcgtcatgccgcctttataaaaatgcggcgtcgctccatccgtcgtgtagaagaaatgatcataatgccggaagcctttttgatggagatcctgcaaaatcgttctcaaatcagggcggatggatgaatgtctgagcgaaacatagtagcccaattcaagccgtctcatcacctcgccgccattcatcgcctcgtggtcggaatcagctccgaacagtttcatcttcgccagtgttttttcagaggctccgggaaaatgcccttctatccgcttgcgcagtttttttgtcgcctgcatgcaatgaagcatcaggtcatcgccgtccatgaggcgcggccatccggtcaattctccgccttgaatgacatccgggtgctcaatccattgcttacggacatcaaaagaaagaagctgatcctcattcagcacttcagtctgcagatcatatctggaccaccagaaatattgcaccggctgttttttcagttcctccaatatagtaagcgctttctttttaccgctgtgcaaaagaaaaaacaagttatcattaacaaacgtcgttgttccgaattgagacacatattcggcgagcgtttggggattatatatttgaaaaggatgtgtatgcggttcaatgtaacctggcacaatgtattttccttcacaatttatggtatgaatgtgctctgctgcatcaggaagctcatgaccaacatatacaattcgatctccgtaaatccagacattctttttcagccattgttttaaaaaaggatttaatacgagagcatcccgtaaaagtagcgttggaagcagctttgagtctacaacatccgcctgtgatctgatgtctttatttttccagttaaaggtacgttcggacattcacatactctccttcgcttatattagacccatcgtatcacatccgcacaattatcgcacggctaaaacgttacaaattattgaagatgaatgaaaaactttttctaagggagctgaaatgatgaaaccgaatatcagtttattaaatgccgttctgcgcatcacttgcggcctcaccattttgtctgctgcttcagcgaaatacacgagaaaaccttggtgtaagatgcatctcttctgtatgatgatgggcgcgatgaaagcggcatccggcatcctccgcttctgtccggtgacatatatgttccaaaccggaatgaatcaggatgacagccgtcagcaagaaaaataacaagccgtttcggcttgttatttaatttgtcctgtcccgcgagtctgagaagaatccttctatacgccggaggacttcatcgatgactgcgtgtcacacggcaagccgacagtctaggtcgtcttttcagaagaaaacccgcatcttatatgacgcgggggtttcctcttcatcgctgcgatgctttcagcgcacgggcgccgatgtcgcttctgtaaaacagtccgggttttgtcagccctgaaacggcgctgtacactttatctctcgccgcttcaaatgtctcagcaaatgccgtgacattggcgacccggccgccgtttgtaacaaattgtccgccgtcttttttcgttccggcatgaaaaacggcgatcccgtcttcagcggacgtcaaactgccgatcggagtgcctttcgcatagccttccggatagccttcagaagccagcacaacgctgacagcggccgtatccttccaccttaggtcaacatccttctcatgcagaagatctaagagcacctgaatgaggtcagattccattctcggcacgacaacctgtgtttccggatctccgaagcgcgcgttgaattcaatgacttttgatccgttttccgttagaatcagccccgcgtacagcacgcccgtgaaggagcgcccctctttgaccattgcttttgccgccggcttcacaatcgtttcgactgcgcttctgacgatatcatcggaaatgtgcggcactggtgagtaggctcccattccgcccgtattcggccctttgtctccatcgaaggcgcgtttatgatcttgagcgatgaccatcggatagacggtctccccttttacaaacgccattaaagaaaattcttcgccggcgagaaactcttcaatgacaacagatgcgctcgcctccccgaatttctcatcctcaagaaaatcgtgcaggcattcaatcgcttcttcttccgtcatcgcgaccgtgacaccttttccggcggcaagcccgtccgctttaatgacaatcggcgcgcctttttgctgcacatatgctttcgcctcttcaaatgaagtaaacgtctcgtactccgccgtcggaatgccgtattttttcattaaatccttggcaaactgtttgctcccttcaatgatagccgctttttcagacggtccgaaaacaagcagtccggctttttcaaactcgtcagctatcccttcaatcagaggaacttcagggccgataatcgtcaggccgacatgatgttctttcgcaaacgcaatgagtgcggcatgatcgctttcttcaatgttgaccagcgtcgcgcagtctgccataccgtcatttccgggcgcggcgtacaccgtgtcaacaagcgggctttgcgccgttttccaagccagtgtgtgctctctgccgccttttccgataatcaatacattcacgcttcgttccccctcttaatgtttgaaatgtctgatgccggtgaatatcatggcgatcccgtattcatccgcttttttaatcgaatcttcatcgcggaccgatccgccgggctggataatcgccgtgacgcccgcttttgcggcttcttcgactgtatccggcatcgggaaaaacgcgtctgatccgagcgcgctgccttttgctttttctccggcctgctcaatggcgattttagctgaaccgacgcgattcatctgtcccgctcccacaccgaccgtcatatggtcttttgcaagaacgatcgcgttggatttcacgtgtttgacgactttccaggccagcttcagatcttcccattcctgctcgctcggctctctttttgtcgggatgctgatgtcggcgtcatcaaatccatggacgtctaaatcttgaatcaaaaggccgccctgtacggatgtcagctgtttttctttcttccctgatgcggacacgtcaagcgtgagcagacgaaggtttttcttcgccgtcagtacgttcagcgcttcttcactgaaagaaggggcgataatgatttctaaaaagatgccgtgaagggcttcagccgttgcctgatcaacttcacggttcagcgcgatgatgccgccgaaaatggaggttttatcagcttcatacgctttattgaatgcttcctcaattgaagctcccgtaccgactccgcacgggttcatatgtttaacggcaacagctgcgggttctgtaaattcccggacgatttgaacggccgcatccgcgtccttaatattgttgtaagaaagctctttgccgtgaagctgttttgccgccgcgatggaaccggagacgggaagtgcgctttgatagaaaacagcctcttggtgagggttttcaccatagcggagcgattgttttttctcaaatgtaacggtgaattgctcaggggctttctcaccggcctcgcgtgttaagtaatcagcgattaatgcgtcgtatgccgcggtatggcggaatactttggccgcaagctcgcgttttcttttaagcgaaacgccgccgtgttctttcatctcattgagcacggagctgtaatcggccggatctgtgatgaccgtcacatcctgatggtttttcgatgcggcgcgcagcatgccgggaccgccgatatcaatgttttctatcgcttcatcgtatgttacgtcttcttttgaaatcgtttctttaaacggataaaggttgacgaccacaaggtcaatcggtgcaatgccatgctcattgatctgcgccatatgctcttcattgtctcttacggcaagcagaccgccgtgaatattaggatggagtgtttttaaccgtccgtccataatttcaggaaatccggtcacttctgaaatgccgatgacatccacaccgttttcctgaagaagtttttttgttcctccggtcgaaatgacttcgacgccgagctctgtcagttcctttacgaaaggtacgagatttgttttatcagaaacactgattagtgcgcgtttgattgtcatgccttttcacctctgttatttagtcccagcagctgtttcacaacgctcggataccatttgtgctcaagctcgtgtattgtatgctctatgttttcaagcgtatcgttttcctgtatttcgaatgctttttgcgcgataatcggtccggtgtccatgccttcgtcgacgtaatgcacggtaatgcccgccactttcacaccggcccgatacgcctgtccgacagcgtcaatcccggggaatgccggaagaagcgagggatgtatattaataatgcggcccccgtatgcttcaagcagcgtatctccaatcagtctcatatagccggcgagaacgattaattctgccccgtgcaggcgcagctgttcaataacggcccgttcaaaggccgctttgttttcaaaagatgacggttcaaaggcgaatgacggaatgtgtaaagcctccgccctttccaccgcctttgcctgaggcttatccgtcacgagaagcgagagctccgcatcccacttctcttctctcatgcgtttggcaatggcctcgaagttcgatccgtttcctgaagcaaataccgcaaactttttcatgaaagagccgcaccgccgaaagaaatgccttcgccccgcttgacccggccgatcaaataagccttctcgccctgagcttcaagcgtgtcgataacgtctgtcaagtcctcttctttaacagcaaggacaaaaccgatgcccatattaaagacattgaacatttcttcttctttcagcttgccgtgctcctgcagaaacggaaaaatcggcgggatcggccatgatccgtgatcaatttccgcgctcaatccgtccggcagcatccgcgggatgttctcgatgaatcctccgcctgtcacatgcgccatgccgtccaccttaccgcttttcaccgccttgagcaccggcttcacatatattctcgtcggttccagcaattcttctccgagaggacgcgcaaacggttcatagacagtatccaaatcaagtccgccgtcatcaagaagcacttttctcactagggaaaacccgttgctgtgaaggccgcttgaagtaagtccgattaagagatgcccctcttcgatatgttcaccggtgacgatttcgtctttttccgcgacgccgactgaaaagcccgcaatatcgtattcatcagccgtatacagccccggcatttccgccgtctcaccgccgataagcgctgatcctgactgctcgcatccgtccgccacgccctgaacgatctgctcaatttttaccggatcggccttgccgaccgctaaataatcaaggaaaaacagcggctccgctccttgggcaagcacatcgtttacacacatcgcgaccgcatcgacgccgatcgtgtcatgcttatccattgaaaatgcgagtttcagcttggtgccgacaccgtctgttccggaaattaaaacaggcttttgatacggaagctctgacagatcaaacattccgccaaaaccgcccaggcttcccataacgccgagccttttcgtgcgctccacgtgttttttcattcgtttgacggcttcatacccggcttcgatgtcaactccggcatttttataagcatcagacatccctatcactccttgtcaattcgtttctccttaaaaggcagaaagagaaaggcagcctgaattcccgctgcctttatgtcattttcacattttattttgtcagcaccgcttcttttacgtgaggaagcactgtatcctgataaatttccgtcggatatttgcccgtaaaacaagcgaggcattgtccgcaattggtgtcttcaaattttcggccgactccttttaacaatccgtctacacttaagaaagaaagcgtgtcggcaccgatgatctggcggatttcttccacggaatgagaagaagcgatcagctcctcatgggttgatgtgtcgatgccgtagaagcacggatgagcgatcggcggtgaactgatcttgacgtgcacctctgtcgcccccgcttctctgagcattgtgacaatccggcggcttgtcgtcccgcgcacgatggaatcatcaaccatgacgacccgttttccttcgacaacaccgcggacggcggacagcttcattctcacgccttgctcacggagagcctgtgacggctggataaacgttctgccgacataacggtttttaatgagaccgagttcgtacgggatgcccgttgcctcggcatagccgatggccgcagaaatactggaatcaggcacgcctgtgacgacatccgcttcaaccgcggactcctgggcaagcattttcccgaggtttttccgggcgctgtgcacgttaatgccgtcgatattgctgtcaggccttgagaaataaatgtactccatgctgcagatggaacggttgatattcatggagaaacgctctgatttcatgccttcatcattgatgatcagcatttcgcccggctctacttcgcgaaggtatgtcgcgccgaccacatcgaatgcgcatgtttctgatgcgacgacgtaagcatcgcccatcatgccgattgacagcggtctgagtccgttcgggtcaagcgctacgatcatttctgtttcagtcatgattaaaaaggcataagcgcctttcagcatagatagcgaatttttgatttgatccttcagcgaaaagtgtccgctgcgtttaatcagatgagccagcacttccgtatcggaggaagtctgaaagatgctcccttggttttcaagctgctgcttcaactgtgtggcgttgaccaagttgccgttatgggcgagcgcgaggctgccgttgttttgcgaacggaacaggagcggctggacattttcatatccgcctccgcctgccgtcgcataacggacgtgcccgatcgcgccttttcccttcactttgctcagttcgccgttttgaaaaacctcggtaataagcccctgtcctttatgcgccgtcagtttttcaccgtcagtcgcgacaattcccgcgccttcctgtcctctgtgctggaggctgtgcaggccgtaatatgtgatctgcggagcttcttcatgtccccagatgccaaacacaccgcattcttcattcaggcctttgatttcagcaagcatggaatagctcctttccacgcgcgctcaagttctttcgtttgcgcgtgaaccaattgttgtccgtcctggttttgaatcgccagaagtccgtcagccgttacctcaccgatatgaaccgcatcggccacagccgctttaaacgcctcatggtgttcttttttcactgaaacgacgaagcgggattgagattcagagaataataatgccgcttccccttctacagtcacgttggcgccaaggttttccgtcgtcatgacgctttctgcaatcgctacgcctaagccgccttcagacacatcatgcgctgattgaacgaagccttttttaatcgcgtcaagcaatgctttttggcgtgacagctctatatcaagatcgatttgcggcgctttgccgtaaatgcggccttctgtcattttttgcagttcgcttccggcaaactcaggttttgtttcgccgatcacgtatacaagatcccccgcttgtttgaaatgctgtgtcgtaatatgagcggtatcttcaattaagccgaccatgccgataacaggcgtcgggtagatcgccgttccgttcgattcattataaagtgatacgtttccgccgatgacaggagtgctgagaatattgcacgcctcgctgatgccgtcggccgctttttcgatctgccagaaaatttcaggtttttccgggtttccgaaattcagattatccgtgaccgcaagcggttcggcgccggagcatacgatgttgcgcgccgcttcggcaactgcgattttcccgccttcttctggatctagatataaataacgggcgttacaatccgtcgtcatcgccagcgcttttttcgtgccgcggattctgagcactcccgcgtcagagcccggagcgaccaccgtatttgtgcgcaccatgtagtcatattgatcgtacacccactctttgctggcaattgtcggctgctgcagcagggcaaaaagcgtctctgtcgcatcttttacttcaggcgcgggaacttccgtttcctgaaactcgcggtagtacgcgggttctgctgacggcttgtggtatacaggcgcttcttccgccagcgcgtcgaccggaagctcgcaaacaacctctccgttatggcggaggcggagcattttatcatccgtaacatgacctacggaaaccgcttcaagatcatatttatcaaaaatatcgacaatttcctgttcacgtccgcgttcaatgacgagaagcatgcgttcctgagactcggaaagcatcatttcgtaagcggtcatacctgtttcccgctgcggaatgagatcaaggttcatttcaatgcctgagccggctttgcttgccatttcagcactcgaacttgtcagaccggccgcccccatatcctgaatgccgactaaggcgtcgcattggatgacttctaggcatgcttccaggagaagtttttccatgaaaggatcgccgacctgcaccgcggaacgtttttcttcagatgaatctgacatttcttccgatgcgaaagtagcgccgtgtatgccgtcgcggcccgttttagcgccgacgtacatgaccgtgttgccgacacctttcgcctggccttttttaatatctttatgatcaattaagccgacgcacattgcattgacaagcggattgccctcatagcttgcgtcaaactgcacttctccgccgaccgtcggaattccgatacagtttccgtatcccgcgattcccgccactacttcttcaaacaagtacttcacacgaggtgaagtgagctcaccaaatcgaagagagtttaatacagctatcggacgggcgcccattgagaaaacgtcacggatgatgccgcccactcccgtcgcagcaccttggtatggctcaatcgctgacggatggttatgagattcaattttgaacacgaccgcctgattgtcaccgatgtcaacgattcccgcgccttctccgggaccctgcagcacgcgttcgccgctagtcgggaatttgcgtaaaaccggttttgagtttttatagctgcagtgctctgaccacatgacggaaaaaatcccgatttccgtgtagttcggcaatcttccgataatagattcaatgagtgcgaactcgtcatcactgacacccatttgctgatagagtttctcttcttttatttgttctttacttggttcaagcagtagcgacatgagtttccctccaatttttcacgatagaccggaacaatgtaagaccgtctgcgctgccgagcagttcatcgactgcgcgctcagggtgaggcatcatgcctaatacgttgcctttctcattcacgacgccggcaatgccgctgacgcttccgttaatatcgccgccgtatgtgaaggcgatttgattgttttcttttaatctttcaagcgtttcgtcatcacagtagaaattgccttcgccgtgggcaaccggaatcgtaatcgattgtcctttttcataggaagatgtgaataacgtgccgccgttctgcacgattaattcaaccggtcggcagatgaactttaaatctttgttgcgtctcatcgcgccgggcagaagtccgagctcctgcagaatctggaatccgttgcagacgccgagaaccggttttccttcggcagccgcttttttcacagccggcatgatgtttgcgaatctggcgatggcgccgcatctcaagtagtcgccgtatgaaaacccgccggggatgagcacgccgtcaaatccgtcaaggcttgtttcctcgtgccagacatactcgacttcttcgccgagttcgtcttttacggcgtggaacatatcaatatcacagttggagccgggtaacacaatcaccgcaaatttcactgtgcgacaacctcctcaacttcatatcggtagtcttcaatgactgtattggcaagaagcttttcacacatttctttcacgagcgcgtcaagatcgcggtcagatttttcaatcgtcagctccatgtattttccgatgcgcacatcctgcacttcattgtaggtcatgctgtgcaatgcatgctgcaccgcgcttccttgaggatcgagcacactttcttttaagctgacataaactttcactttatacattatgaaatgcctcccagtcttttgaaaatctcttcatatgcgtcggttaagcttcccaggttccgtctgaacaaatctttatcgagcttttcgtttgtgtctttgtcccacagacggcacgtgtcaggagaaatttcatccgctaaaagcacccgtccctctgcgtctaagccgaattccagcttaaaatctattaatctgacgccgcagtcttcaaaaatatgctgcagctcttgattcacctgttttgtaatcgatttgatcgtttccacctgctcaggagccgccgcttttaaaagccagatatgatcttctgtgatgagcggatcgccgagtgcgtcatctttatagtaaaattcgataatcggctgcggaagctcagttccttccgggatgccgagacgtttcgacatgcttccggcggcaacgtttctgaccacgacttcaaggggaatgatggtcacttttttgataagctgctctgattctgaaacacgctccacaaagtggttgtcaattcctttggcgtgcagatgtttgaaaatcaggcttgaaatttcattgttcagacggccctttccgctgatctccgcttttttctcaccgttaaaggctgttgcggaatccttgtagaccacgcggagaatctgttcgtcttcagtttgataaattcgtttcgcttttccttcataaagaagattattgttcacaatattcacggaaggcctcctaacccgaatgttgggaatattcaatctatggcggctgaagaagccgcctccggctggcttcttctataaacctaaacgctcaaagatcaagtcgacgtttttcaaatgataattgtagtcaaagcaatcggcaatctgttccggtgtgagacgggacgtgattttttcctccgcttcgacaagctgacggaacggcacttgtttttcccatgcttccatcgctttcggctgaaccgtgtcatatgcttcttcacgaggcagacccgtgtcgattaaagcaagaagcacgcgttgagaatagatcaaaccgagtgtgcggtccatgttgcgtttcatattttccgggaataccgttaagtttttgacgatattgctgaatcggttcagcatgtaattcagcgcgattgtcgcgtcaggaagaatgatgcgctcagctgatgaatgagaaatatcacgctcatgccataacggtacattttcgtatgccgtcagcatgtacccgcggatcacgcgcgccatgcccgtcatattttccgacccgatcggattccgtttatgaggcatagccgatgaacctttttgtcctttagcaaaaaactcttccacttcacgtgtttcactcttttgcagaccgcggatttccactgcgaatttttcaatgctcgtcgcgatcaaagccagtgccgccatgtaatccgcatgtcggtcgcgctgtaatgtctgagtggaaatcggcgccgctttcaggccgagtttttcacagacatactgctctacgaacggatcaatatttgcatatgtgccgaccgcgccggaaagcttcccgacttcgatcccttcttttgcctgcttgaaacgttcaaggttgcgtttcatttcttcgtgccaaagcgcgagtttcaggccgaatgtcgtcggttccgcgtgtacgccgtgcgtgcggcccatcatgaccgtgtatttatgttctttcgctttttcttttataatgtcaacaaatctctcaatgtccttgagcaagatctcattcgcctgttttaatagataggaaagagcggtatccacgacatctgttgacgtcaggccgtagtgaacccattttctttcttcgcctaatgattctgaaaccgcgcgggtgaatgcaacgacgtcatgacgcgtatcctgctcgatttccaaaatgcggttgatgtcgaaagacgcgttttcgcgcatgactttgacgtcttctttcggaatgacgccaagctcagcccaggcttcacaggctaaaatctcgacttccagccatgcctggtatctgttttcgtccgtccagatcgcggacatttcaggtcttgaataacgttcgatcattatgctcgtcctccgtctcttttcatccatatgttcgtgatgtcctgaatccatgtttcatcaggcttccgcaaaaatgtcatatgccccattttgcggccttttttaatctcatgttttccgtacaggtacagtttggcttcctttaaaagctccgtatgctcctccgcaagcttcacttcatcaccgagcagattcaccatcattcccggtttgagaagatcggttctgccgagaggaagtccgcagaccgctctgatatgctgttcgaattggctcgtttcacaaaggtcgagcgtataatgcccggaattgtgaggacgcggcgccagttcattaatcaaaaggtctccgtcttccgtgacgaacatttccaccgcaagcggcccgacaagttccaatttctccgcgagctgaacggcaagcgcctctgcccgcttctgaaccgtttcctccgctctcgcgggcacgatgctttggaacagaatattatttttgtggatattttcagcagccggaaaggttgaaatctcaccgtgtactgatctcgtcacgataacggaaagctccatccggaacgatacccagctttcaagtatgcacgtgccgttctctaacagcacagccgcttcatctgtctgtccttcttccttaatgacaaattggcctttgccgtcatatccgccgcggcatgttttcagcaccgccgggagccccagtgcctgaacggcttcctcaagctcccgtccgctgtttacgatccgataaggagcgacttgacagcctgctgactggatcgcctttttttccgtttccctgttttgggtgatgagcagcagctcgcttccctggggaagatatgcatgttctttgagccagttgagcgcctcgtaatcgatattttcaaattcgtacgtaatgatgtcactgactccggccaatttttgaatcgcttcacggtcattgtactgggcggtaatctcaatatcggcgatctgtccgcaaggcgagtctttcacgggatcgacgacagcgactttatagcccatttgttttgcggcgacagccatcatttttccgagctgtccgcctccgataatgccgatgacggcgccggggtaaatcgtttttttatcagacaagctgatcactgctttccagcaccgtttgttttgtcgcatttcttctcgcctctagtttatccgcaatgtcgtcgtcaaatgccgacaaaatttgcgcggctaacagaccagcgttcactgcgcccgctttcccgatcgccgtcgtcgcgaccggcacgccgcctggcatctgtacgatagacagaagagaatcaagcccgttaagcgattttgtctgaaccggtacgccgatcaccggcagcgtcgttttggccgccgtcattcccggcagatgcgccgctcctccggctccggcaataatgacttttaagcccctgtctctggcgctttctgcatattcaaacatcaaatcaggcgtccggtgcgcggataccacctgtttttcataaggaatgtgaagttcgtcaagtatgtcgcatgcatgtttcattgtctcccaatcggaggtgcttcccatgatgattcctgctagcggctgcattctgttcccaccttctcatgctttgtttttcagaaaaaaaagcccggcttatattgcaactatgaggaagcaatacaaaccgggcatggcgcgcgtatcgtcagtcgttcgcttctgcgatatccatgtcagctgtttatcactttcctgcatagtccggccgtttacggcagccgggtagaaacttatgggccatattcccaagattatatgaggtcgtgttttgatttcatgtttatcttaacaacggacttggataatgtcaacgacattatcgaacgatataaaaattctttcttttaatgttcgtgtttagatcaatttcccttcaaatacgatttttttcccgcaaggaacgacttgaattgatccattttctttcttttctgtaaagatcggctcttccatccgccggacgggcatataaccctcttccttcattaaagtgagaatggtgtcaatcgtttcatcttccgttacttcaaaccgtttcttttttggctttgtcattccttaattctcctcttcttcactgctttcacccagaatccgccgtggatcgttttcggctcaaaggcgataataaacgctttttcatcaagcgttttaatcgtatcataaagctgaagctcatatttgcgcggcgtcagaatctgcatggcggtccggtctccttcaagtccgcccgcaacccagcttgtaaccccgtatcctttttcccggagctgtttcggcaggtccagatcgagctccttcgtaatgacgttgactgtaatatagccgagcgccagtttctcttcaattttcattcccactatgacgccgaggccgtagccgagcgcataggcaatgacgttttgaatttgattcagattgccgagcacgagactcaggccggtcacatacacaaggatttcaatcgtactgatgcctgcggcgaaatagcgctgtccctttaatgtcagaatcatcctgatcgtaaagaaagagacatatataatgttaatgatgagaataatgagaaccatacctatactgttggataaaatcgtctgcatcactgattcccctcctctgatactttgaaaagcatcaatccttcaattaaggatagtttaccctcttttcatcattttcaaaagaaaaaaaagcccgccccgcaaggcagactgttaagctcttatcagtgaagcccggcttttttcaatcgtttgacggcttcatattccttctcaagttcactcagcgtgtacccggacagttcctgaacatggtcttgataaaaccctgagcggatcagctttgtcctcaggtgctgctttttccgattaatggcttctcgcaacaacggggccatcttcatcatccctttccgaatcataaagagcagtgccgctttcgaattgctgttgctctcatcatatctcggccgggtcctcaaaacaatacgctttattagaaaaatttgtaaacattgtgaaagacaaatttcgacttataaagggatcagcgaagcagtaaagtactctgaaatgagcggccatgtcacagccgtaaaaacgagcatgatgatgaccgccgcggaaatacagtacatcacgtcagccgcaggcttttcagccgatttgtatagaatctgcacaaactgcaccatcgccgaggcggccataaacaaggtcagcgccgtaaacaccacggtgacgaccggcagattcaatatcgcgaaaatcatccacacgatagagcaggcgacagccggaaccaaaagcgatccgacccctgcggccgcatcccgcatcgtaattttctgtttcatcatataacgtgatacaagccagaccgcgccggccgcagcggcaaaaaagacgagcgtatacacgagaacgacagtaaagccgtcaaaaaacgtatgatgccgctccccgtatccgagaggcctttgctggcttgccctcagctgaaaccaatttccgattgagaaaaagatactgaatacaagcattgaaataagagcatatttaaagcgggaaaagccgtcttccccaacgaccttcaccggtgatgtcaaaatgcgcagtgcgaaacggcaataacgtttgaccgcggcccatgcagaagcgagtttttccgtaaaagccggagccgggcgccgttccttttcttttttcttttgcttttgataacgtcccgcatttctggacattctcgacagcggttcttcatcagtcccctgatgctgtttttcttcttccaacgtttcttttctttcttccgtcatgtcagcaactcctatcaaaaaaatacggcggaatttgttaaacaagaaaataaaacacttatataaggtaccgaagcgtccttcaacagtcaagcggttttcttcacccggacacccacatgacgttttatagtatgtattggttttacggaataggacaaaaacaaaaaaccggctttcctcagccggtttttccgttatttcaagaagatgaaatacaggataaagatgacgaacagcccgtacataatcgggtgaacgctttttccttttcctttgcagatcattgtaatcgggtagaatataaaaccgatcgcaatccccgtcgcaatgctgtacgtcagcggcatcataatcatcgttaagaatgccggcacagccacctcgaatttatcccaggcgatcttaccgagcggcgccaccatcagagcgccgacaataattaaagccggagccgtcacattcgtggtgacaactgacagaagcggcgagaaaaacatcgccagcaaaaagagaatgcccgtcacaacagccgcgaagccggagcgcgcccccgccgcaacgcctgagctggattcaacataagaagtcgttgtagacgtaccgagtacggctccgataacgattgatgtcgaatctgccagaagcgctcttcccgcacgcggaagtttgttttccttcatcagcccggcctgtgtcgctacagccaccagcgttccggccgtatcgaaaaacccgacgaacaagaaagttaaaatgacaatcagcatttgtacggagaagatatccggaagatgcatccacgcctgtccgaaagtcggcgcaagactcggcacgctgccgacaatgtgcgtcggaaccggaatcagtccgcagaccatgccggcaaccgccgtcagaagcattccgataaatacgccgccgtttacgcgaagcaccatcagaatgaccgtcacaataacaccgaaaaccgtcagcagcacagggccgctgtgaatattgccgatagacaccaaagtcgatgagttcgcttcaataatgcccgaaccctgcaaaccgacaaatgtgataaacaaaccgatacccgcgccgaccgccaatttcagctcaggcggaatcgcattaatgattttttcccgcagtcccgtcagcgaaagcgccacgaagataattccggaaattaagacgccggaaagcgcagcctgccatgaaatccccatgccgaggacgacagagaaagcaaaaaacgcatttaatcccatacccggcgcaatcgcgatcggatactttgcaatgagccccattaaaatacagccggccgcagacgccaaggctgtagcggtgaacaccgcgccctgatcaatttttaatgcttccggaaatcccttcacaccgtttaaagacaatgtcagcggattgacgaacagaatgtacgccattgacaaaaaggtcgttaaaccgccgatgatttcattacgatagcttgtccccagctcatcaaactgaaaaaattgcttcaagccaattgcctccttcattctctcccatttattctgcccgttatccgccaaataaaaaacgccccaaatacatttgggacgcttgactacatacgttcagtctgaataaataagaatggattatttatatcaaacgattgagattgatccgtagtcaagccatttacggtagcttggtagaaacttgcgggccatatccccgccattatacgatatctgcatatttgatttctgagtctattgtatcaattcaattttgaaaactcaataaaaaaaacgaacaatcccgttaaaaaaatttggtttattcgttaattgaccaaaaatggaagacggcaaaagccgccttccagacatcattttccgtccgcaggccgaaccggcaccgcgaatgtgatccccttatcatccgccagcaagttcataaccgtttgattgacgtacaaagcgtatgaatcgaatgagaaatcgcgcaacgaatagtctttattggatgaatcatccaattcaaaaacggattccatttcacccgttttaaggttcgtgactttcgccttattccctttcagataatagcctttttcatactcattaactgatggccaggttttcatttttttcgtattgccgagaccgattgactcaccgacattgatcagctgatcttcatccgctttgctgtaattaattcctgtgaattgataatcgacgatcacccgtctgccttgctgtttgatctttttgatggtgatgccgacatgatgatgtttcgttttataactgacgggcagttttgttttcagaggcacgatttctcccggctctgattctgtttttatatcgcccgttatgaaaagtgttttcgctttcgggtctatcggtttgctgaattgagtttggccgcgtattcttttcccgccgccgggaagattctttctggcgccaagttcaatattcgacgccgtcatttcataatggtttccggcatcatccgttgcctcgtaaatcgagatggcatcatttttggctgcatcatagaagtcgatagaatacaggagagccgatcccgtcgttccgttttccgcccggatatcgaaaaagcggtataatccgtgatttacattcacagctttcgttccttcaagagaaacggacttttgttttttaatagggagtgtaaagcgccagtttcccgggatatccttgatttgtgtaatgacaagcggaagcttatcaccgtctttcagctttgagccgtccgtgaacaggcgaagctgtcccgcgtactgcccgtctttcatttttttcatattactgctgtcataatcctctgctaacatattccatggatctttataatcaacttgaaaagagatgctctcctcatctgatttcaaattgtcaacggtaaaattgtaaacgagctgtccgctgtcgtaatacacacttttcactgtcaccgtgattccgcgtgattccgctttctcattcagttttgtcaccaaattgcttttaaacagcgcagaacctgccttatcctgaaacagactgtaaatttgtccggcaacaggaatgtttcccatagccgtattaacggagggcatgaataagcctgaggacaaatacagaataaacaaagcagcagcaaccgcgagtccgtttatcagttttcttccccatctccgtctgacggcgccttcttttccggcacggacagcggcgctgtgtatcacatttttcaattcagctttcggcacgtcaatgtcctgatacaattgcttcatttgatgcttttccatatatgtttatcctccttttccagctcctgcttcaatgcttttctcgccctgtgcagatgcgtttttacagtgccttccgccataccggtctgttcagcgatcatagcaatcgagaaatcttgaaaataataaagctgaatggtcagctgtatatgttcgtcaagcgtttccagggcattccgaagatctatgtattcttcaatgttcttattctccgcgcgcgtatcatgctgcggctcaaacgggatgacgtctccgtgctttttcctcatcgcaaaaatcgtatgaagcaaaatccggatcagccacgttttaaaatatttcggctccttcagctgcgcgatatgaagaaaagccttgtaagccgtttcctgaacagcgtccagcgtatcttccttgtgatgcaaatagagataagctgttttatataaagtatcctggtgtgcggtgatcagtttttcaaaggctgcggcatcaccttttttcgcctttttgatcaatcgttcttccttcaccttatccacctcctatgctgttagatatgaatcaaggcaaaacggtttcaaaaagatgaaaaaaaacgcctcttttttaaaagagacgtttttttcttcatttattcccattcaatggtattaaaacattataagaattaatttattgaatatcaagccttttggggtttgtagttccttgatttagaagttaccattaaaaatattgctcccccgtgttctgaatattatgggagggggtaaatactgtgatttattgttttagttgaccttataataaaaaaagcgcactaaatcgaattgaaaggtgcaaaaacatgattacaaatcaacaattagtcataaacaatttggaagaaaaattaaaatcatttacccatacagttagcggagagcttacaaaggaagaagatttcatcatagcaaatacaaaaattcctactgatacatttaatgtagtattgccgaaatctccaaatatcaaaaatacagttaagatcagacatggaatcgataatttttcatataaaaaatatccctttagtatttggattgatgctcagtatttaactgaggattggacaaaacttatacaagaatatgatctaaaagaagcggaacgtaatgtaatgatgaaacttgaaaatactcttaatgttgggcaaagaatttcccatcagcttatgattactgctgtgaaaaatgatgaagaacttttaaaatatatagacgtattcatgagcttatttgaaggtacaccagaaaaagatgcactagaaagttattttaatacgttttcacaagtaaaattaggttcagaagttcagatgtttattggatgcatagatgaaatgcctgtaactaccggtttattaatagaaaccaaagatagctatggtatttatgatgtgatgacaaaagaaacatttagaggtaaaggaattggcagtgaaatgtttcaatttcttctaaagcaaacaaaggataaacaaaaaccagttgtattacaggcttcagaggatggaaaaaatatctataagcgatttggatttatagatgtcggagaaatggttgtatttgaatagagggtttctttaatttgcttaatttgaacaaactttattctaaaacaacattaattattatcccattgtggaatactttttctttaaaattcacggttcaattaataatattggatcaattgttgctataaaagaaaaaagagcttagaacccttataaaccaaggattctaagcttcttttgactattcccactcaatcgttgcaggcggcttgctcgtaatgtcatacacgacgcggttgatgtgtttcacttcgttgacgatccgtgtagaaatcacttcaagcacatcccaagggatacgcgcccagtcagatgtcatgccgtcaattgatgttacggcacggataccgattgtgtaatcatacgttctcgcatctcccatgacgccgacgctgcggatgtcaggaagaaccgtgaagtactgccagatatcgcgctcaaggccgtggttcgccacttcttcacgcagaatcgcgtctgattcacgaacgatctcaagtttttcttccgttacttcgccgagtacgcggatgccaagtccaggacccgggaacggctgacgccatacgatatcatccggaaggccgagctctgtgccgagcgcgcgcacttcgtctttgaaaagggtgttcagcggctcgatcagttcaaactgcatatcttcaggaagtccgccgacattgtgatgcgatttgatcgtttgcgccgttgcagtaccgctctcgataatatccgtgtaaagcgttccttgcgcaaggtaatcgatgcctttcagcttgtccgcttcatcatcaaacacgtaaatgaattcgttgccgatgattttgcgtttttgctcaggatcagaaacacctttcagcttgtttaagaatctgtctttcgcatcaactttaatgacattcatattaaagccttcgctgaacgttttcatgacgccttccgcttcgcctttacgaagcagaccgtgatcgacgaaaatacaagtcagctggtcgccgatcgctttatgaattaaagcagccacaacagaggaatcaacaccgccgcttagcgcgcaaagaacctgcttgtctccgactgtttcacggattttttgcatttcgatttcgataaagttttccattgaccatttgccttcacaatcgcaaacgccgaatacaaagtttttcagaagatcattgccgtattcagagtggcgcacttccgggtggaactgaacgccgtaccaattcttgtccgctttgctcatcgctgaattcgggcagtgatggcttgttgcgtcaacagtgaagccttcaggaacttctacaaccaaatcgccgtggctcatccacacaacctgttcttccggaagatctttgaacaagtcaggggttccttgaatctgaatgttggctttaccgtattcgcgctggcttgccgcctcgactttccctccgaggtaatgagtcatcagctgcatgccgtagcagatgcccaatacaggaatatcgagttcaaagattttttcatcacagcggaaagatccttcatcatatacactgttcggtccgcctgaaaggataattccttttggattcatttctttgatttcctcagctgtcaacgtatggggatgcagctcgctatatacgccaaattcacggatccggcgggtaatcagctggttatactgactgccgaaatcaagaacaagaatcatttcattcactaacttcgtcatggttgtcacctaatctcctctaagtttttgacacagaaaaaacggaggacacacgttcagccctctgtcgcgcaagacttgtccggaagcccggctttttaacgctcccgggctcccatttaacattcatttattctaacaacaggacggtatgcggtcaagactatcttcttttaattatattttcccacaactgtcccgattcattccaaagctccgctgcattatccctgcggtataaggcccgctcatagagcagcgtcagctcggacatgtcgtttgtatggtacgcctcgtcaatcctcgcggcaaaatcgcgcagcgtttctccgtctcccctgctgaatccttttcgtttcagctggcggagcagcgcggcatatgcgtcgaaaaagacgtcttcacccgttcgccgcttcaatctggctgctgtaacgtgcggaatccagcgcgcccggagcacccaggcgagtgccgccgcggctgaaatcacgataacgatggctgcatacggccacaggtgtgccgcggttttgttgcggatcacaggctgcggtgccgcacggtgatcccgctttttcggtgttttttctttttccggctttgtttcctgacgctgcttgtcagacggtgaatccgaattccccgctgagcctccgctgtcttttgccgcggtatgattttgctctgacgtaaactccgtcggattggtgaagccttttgtcggctcaaacgtcacccagccctgatcgggaaaatacacttctacccacgaatgggcgttgttgtttgtgacttcataaatgtggccgttatggtcgcctgcccctttatattcgccggatgtatagcccttcacccaacgggcggggattcccgcagagcggagcagcacagccattgccgatgaaaagttatcacaatatcctcttttcgtttcaaacagaaattgatcgacataatcctgattgtgctccggaaccgcgacatcctgtgtattatacgaaaatgcggaagatccgagataatcctcgatcgccttcgctttatcgaacatattatgatgatcccgcgtcagtctgtccgcaagctgtctcactcttttcggaaggctgtcggggacctgtaaataacggtcattgaattgattctgctcacggtatcgtttcactttcacttttctgagatcattcagcttaaagacgggcgcctgaaaagtcaccgtgtaccgtcccatattgcggatgttgcccacttgttcactgaccggcgtaatttgctcggtgtttccgttcatttcaagctgaatcgagtgcttcggtttaatattggagacgccgatcggatacatgacgtgattatagagataattctcatcaatggacacctgtgccgtataccgtctcgtctgcacactccggtcaaaccatatatcttccacgttgccgcggttcagtttataggacatgccctgatcggtctccacccagcctttccccgtgtatgtatccttcgtttccacccggaagtacgcccgttcttttcccttccatgtgaaaaccggcgtatcatcctgctgaaaagggccgcccaatgtttcatcatgattgccgtagccgattttgctttcggcggagggcacttccttgtggtttgttatttttttaagaaacggcacggggtccggccagttcgggtctgatttcggagccgccagaccgaacacgacggaagcgcagataaacagcatcagcggcagaaaccatttgagtatcaatctttttttaaacgctatgtgttccgtaagccggatgcgctccatatacaaaagccccatcatcaaaaagccgataaagacgatccggatgacggcgtacgcggcatcataaggagtaaacgtatcaagcacggtgatatacgccaccgtcatgataaaaaagaataatattttccgctgatagatcacccagtaatgcagcaaatacacgagcagccataaaagcacaaaaaacagcaatgtgcggaatgacggattcatgtcattccatcttccggacccgatgtggcgggcattttgcatcacgtcccgcaaaaaagaaacgagccattccggctgaaaaaccgaacctttataaaacaggatgtgaatactgatcaacgtaaacagaatgcaggacggcacggtgacgtaccacctcatccggaagaatgacagcagaaatgccaaaccgataaaaacgatgaaaaaaccggtatgttttgtatccgtaaaattgtgcagcggcctgagccattcccataacaataaaaaagcgagaaaataaaacagcagcagactcagcctgcttccctggttctcgtcatgcggcatggcgcgccacctctctttctaaacaacatgggacacccgtttgtccctgatcatttgcaccttaatatttttttgagcgaagatgagagcgagtttccgttctttctcagaaagcgcggcattcgtttctttcgccaaaaacaccgtcatgtcagcacggccgggctcagcctgtttgagaaggtcttctgtaagactgcccgtcacgacggcaatggaagctttgcggacgcgcggatccgccagctcttttcctaaacgcccgcctgcatcggcttcttccgattctgaagctgatgccaggtaacgcagcatctttctgaaatgccggtctccctcccggacgggaaatacggtccggtcactccccaatgaaataaatcctgctggagagcccttcacaagcgccgtgtaaagcagggatgccgaagctgataccgcggcttcaaacgatggggacggtctgcagtccaaaaggagaatcatattcacactctgcagcgggtcaaattccttcgtcatcagctcatttcgccgcgccgatgttttccagtcaagtgcggaaaaccggtcgcccggctgataatttctgacgctcgcagccattgcggagcggtgtacctgaaacggagcgccggcagccgcaccctcttccccggaggcggcctgcggcttatagtgaacagacccgtacgccgggaaaaccagaaccgcatccgtaacggaaaacgacgccgtcttgtccaaaagcccgagaacatctcccgtccgcactcttatcgtatgtaaatgatgctctccgcgcggcacctgcggcagctcatattgtaacgtcagcttcctttgaaaccacggaaacacgagctgtttcgcactgcgcctctcgccaagcgtttccggcatcacatcttcaatgaccatatatgtcagcggaaacggcaggcgcctcgtcagcctgatggtgacagacagcctgtcgcctgaggttaactgggcggaggacacgtcacgcgccacctgaaacgcccgcagcgggtacacagcgaccagcccggcgtaaacggtaaacggcaaaaacgcataaaataaaaaccagctcacaaatccgccctgaaacatggcataagaaaagacagccgccgtcagtacggccaacataagcagcttccagccatatagaagccaatgcatcttccttctcattagcggaccgacatcctttggacgggcactttttccgtttgcatgatgtcttctataaccgcttccggggtcacatcgttaaatttcgcctcggcggtcaagatcattctgtgcggcagcgtatacggagccaaatactggacgtcatcaggaatgacgtaatcgcggtcatgaagcagcgcgtacgcctgcgcggctttcattaatgagattgaaccgcgcggacttacgcccagatgtacggacggatgccggcgggtatgctgagtaatgccgacgatatacgctttaattccctcatccacccgcacctgctccaatttttgctgaaggctgataaactgttctttagaaatgacgggctcgattgtttcaagcggattgcgcccttcctgcaaagacagaacttgaagctcttcctcggcagtcggatagcccatgcgcagcttaaataaaaaccggtcaagctgggcttcgggaagcggatacgttccttcatattcaaccggattttgtgtggccatgacgaaaaacggctcagccagccgcattgtctttccgtcaatcgtgacattcccttcctccattgcctcaagcagggaagactgcgttttcggagaggttctgttaatttcatcagccagcacgatattccccatgatcggtcccgggcggtattcaaattccatcgttttcgtattataaatagagacacccgtcacatctgacggcagaagatccggcgtgaactgaatcctcttaaagtcagctccgatcagcttggccaaagcgcggaccatcatcgtttttccgactcccggcacgtcttccagcagcacatgcccttttgcgagaatggcggccagactgagtatggcgatatcccgttttcctatgatgatgttttcaatatgctcaacggctttctccagcagcggatgcagctcttctttataagccattcttctcctcctagtcatctctcaaatttcaattatcgtaacctaactttaccacaaaatataaacagtataaaaaaacgtttccagcgaattgtttccagtctgaaaaaggaaaaagctccctttagaaaggaagctttatttcagctggagaggctccatatgaacgtgtgaatggtcaatggcatgttcctctttcatcttgcgttctacctcatttgcgatctcatgactctctttaatgttcagatcagacggcacttcaatgacgacatcaatatgaacggagctgcccagatatctcgctttaatatcttttaaacggctgacgcccgcaatctgttcaatcgtctttttataatcagaaatatgtttgacatcaaaaccgtcagtcagcgaatgagaggattccttaaaaatatcccacgcggttttgcagatgatcaccccgatgataaacgcggtaaccgtatccacccaagccaaatggaactgtgaagcaaaaattccgataaacgtgccgatactgacgagcgcatctgatttattatcagcggccgcagctgaaagggcctggctgtttacctttttggcaagccctttcgtatagcggcagaccatcagcatcacgacggcgctccccgcggccgtccaggcggctatcatatccggtgtttcctctttaacggaaaaaatagattgcgcggcgctgaacagcacttgcattccgacaagcatcataataatggaagcgatgagtgacgcgacggtctctgcccgaaaatggccgtaaggatgatcttcgtcaggaggtttctgagagatgcgcaaaccgatgaaaacagccgcagatgccacgatatcagtcgtattatttaaaccgtcggcctgaagcgcttctgagtgaaacaaataaccgatcacaagcttcacagccgacaatgccgcatatgcgccaatactgacaatcgctccggtttcgccttttttcaattcatgatatctctccactgaaaatcctccttcccgttcaatttttccttcattatcatacaaagcaaagacacagtgggtctatagaaacatgattcactttccacagaaaaatagtaagcatagaacatttatgcgctcaggaaacttatttttattcacgaaacccctctcatcccaatcgtatcaaggattctcgccaccctatgttcatggaattattttcaaacccattaaaacacaaaaataacagaaaattatttcttttccttccggcaccttctgctgtacggacgagaaaaaatgtcatattttcttacatcactttcaactgtctgtggcatttatgatagaataatacttgtcggaatattcagcataaacaagccaaaaggaggcaaagaatgaatcagcctaactctttatcaaagggattaaaaacccggcatatgactatgatttcaattgccggcgtgatcggcgccggattatttgtcggaagcggatccgtcattcattccaccggacccggagcgattgtctcctacgctttagcaggattattagtgatttttattatgagaatgctgggggaaatgtcctccgtcaacccgacaagcggttcgttttcacagtacgcgcatgacgccatcggtccttgggccggttttacgatcggatggctgtattggtttttctgggtcatcgtcattgctattgaagccattgcaggcgccggaatcatacagtactggttcccgggcattccgttatggctgacgagtctacttctgaccgtgctgttaacactgacgaatatttattcagttaaatcgttcggcgaatttgaatactggctttccttagtgaaggtagcgacgatcgttgtcttcttaatcgcgggatttgcgttcattttcggaatcgtccccggcagcaagccggtcgggctggaaaatctggcgggcagcggcggatttttccctaaaggtccaagttccgttctgctcggcatcgtcgttgtcattttttctttcatgggatctgaaattgtcgcaatcgcagcgggagaaacgtcaaatccggtcgaatccgtcacaaaggcgacccgctcagtcgtttggcggatcattattttttacgtcggctccattgcggttgtggtcacactgctgccgtgggattcagccaatattttggaaagccccttcgttgccgttttgagccatatcggggttcccgcagccgctcaaatcatgaatttcatcgtcctgacagccgttctgtcctgcctgaactccgggctttatacgacgtcacggatgctgtattcactggcagagcgaaatgaagcgccgcggcgttttatgaaattgagtaaaagaggcgtaccggttcaagccattatcgccggcacctttttctcctatattgccgttgttatgaactacttttcacccgactccgtattcttatttctggtcaattcatcaggggcgatcgcactgctcgtttatctcgtcatcgccgtctcacatctgagaatgagaaagaaaatcgaacggacaaaccctgaatctcttaaaatcaaaatgtggttctatccgtacttaacctacctgacgatcatcgccatttgcgccatcttgttatctatgctgtttatcagttcaatgcggtctgaatttctgctgacaggatttattactctgctggtgcttgcctcatatgtattccgcaaaaaacaaaaaccgaaagagagcgcttccgaaagccgggttgcgcaataaccgcaaacacccccctcaaaaaagggcgggtgtttttttaaccaacctgttccaggcagcattaactgtagtacaggatttcaataaatgataaggacaggatgaaaaatggcactagaaaaatttgcagatgaactgccgattatcgaaacactccagccgcagaagaaatcagacggcagcacgtattatgaagtcaccatgaaggaatgctttcacaagctgcaccgcgatctcccgccgacccggctgtgggggtataacggtttatttcccggcccgacgatcgacgtgaaccaagatgagaacgtctatattaaatggatgaatgaccttccggataagcattttctgcccgtggatcataccattcaccattcagaaagcggccatcaggaacccgatatcaaaaccgtcgtccatttacacggaggagcaaccccgccggacagcgacggctacccggaagcatggttcacaaaggattttaaggaaacgggtccttattttgagaaagaggtataccattatccaaacaaacagcgcggggctctgttatggtatcacgatcacgccatggcgattacgaggctcaatgtgtacgccgggcttgccgggatgtatatcatccgcgagcgaaaagaaaagcagctgaagcttccctccggagagtatgacgtaccgcttatgattttggaccgcacgttaaatgacgacggttccttgtcttatccgagcggacctgctaccccttccgaaacgctgcccgatccttccatcgtcccgtttttttgcggaaataccattctcgttaatggtaaagcgtggccgtatatggaagttgaaccgcggacatatcgcttccgcatccttaatgcctccaatacgagaacattttctctctcgctcaataacggcgggaagtttatccaaatcggttctgacggcggactgcttccccgctctgtcaaaacacaatctatcagcttagccccggcagagcggtatgatgtgctcatcgatttctccgcctttgacggagaacatatcattttaacgaacggcaccggctgcgggggcgacgccgatccggatacagacgccaatgtgatgcaattccgcgtcacaaaaccgctgaagggagaagacacaagccggaagcctaaatatctttcaacaatgcctaatgtgacatcaaagagaatacacaatatcaggacgcttaaactcacaaatacgcaagacaaatacggccggcccgttttgacgctgaataacaagcgatggcatgatcctgtgacagaagcgccgaagctcggcacaacggaaatctggtcgattatcaatccgatggggggaacccatccgatacacctgcaccttgtgtccttccaaatccttgaccggcgtccttttgacttagagcgttataacaaattcggcgacattgtgtatacagggccagccgtcccgcctcctccaagtgaaaaaggctggaaagataccgtgcaggcgcactcgggagaggtcatcagaatcgcggcgaccttcgctccttacagcggacgctacgtatggcactgtcatattttagagcacgaagattacgacatgatgagaccgatggacgtcacggataagcagtaaacaaatatcaccccttttagagaaggggcttttttatttatccaaaaagaaaaaataagaagacacttatttgcatatactgtaataacaggaagacgatgcaccctcattggaaatctggatagaaaaaggaattaggagattagggaaaagtatgagacaatgaaggagtgcacgaaaattcataagggaagaagtgactttatgtcttactacaacaaacgtaatcaggaaccgctgcctaaagaagatgtcagtacgtgggaatgcacaaaagaggactgtatcggctggagcagaaagaattttgccggcagtgataccccgacttgccccctttgcggcagtaaaatgatcgacggcgtccgttcgttggtaaatctccaaaacaataatcaaacggcatcaagttagacctcccttttacgagtctcaacatagagaaggcctccatgtctcatgagaggcctttgcgttatcatgtccttttatgatgcaaaggagtaatgaacatgaaaaacgatcggcagcagaaagatctgaaggaaatggcaaaacggcggaaaatgaaccttgccgcacagtcattcatcgaaacgctccattttgccgttccgattctccgttttttcaaatggctcgcctcagccgcagccagctttgttcattaaaaaacacccagcaggcgctgagtgtttttttcatgattggatgacggaaaaactgttgataatgccgttgtcattttcccagactttttcgcattttttcgtatccaaatgataagcataaatggtccggaccttcgcattccgccccgtttcatccttcagacgcttagcgccttttgcttccgccatgaaataaatgatgctgccgtctttagaaaactgaggctgggcatcaatcagcggagcgaagtccttcccgtttgagataatcgtttcatcttttttcgttttgacattcatcagacggatggacgctttttgttccgtccctttttgtgtataagatgtaaagacaaggttctttccgtccggtgacaccgccacgtcgctgataaactgttcaaggtttgtcagatcctgaaggtgttcgcccgctcctgccgcaaaccggatattcgtcggttcagggtcaatccccttctcatttgcctcatccgttttttgataatcctcttttacggaataatgcagaagcgcaaaatcgttttggctgcggttataaaagaagctgcttacactgtcgtctttctcatcggcggcgggatacagattttcataacgtttcgttttcaaatcaaaagatgcgagacggaaaatatcttcatccgcttttccgagacggaaataaatgtgcgtcagatcctttgataaaaacagactgtcagcgcttgccgttcctttataaagcaccgtcttctttttcgtcttcagattaagcttatacagacgcatctcattttggtcattattcccgacaaaatagagcacctgatgggcatcatccagcgcaaacgccggatatgccgaaagcttttcctcgtacagcacgcggccgtcctcgtaatatttcgtcatcagatctttgtctgtaatggaaacaagcagcttgtcatgaccgccggagacaacggctttcccgccgccgtcgctttttcctttaatcagtaaaacggccgcgatgaccgccgccgccaaaacggcggccagcaacatccagatccatcgtttcttcttcattatcaatctctccgtcaatcagaaaaagcaagaatcagtgtccttgctttttaagatggtctattttaatagctgtagtgtccggatactcttcctttgcttaatggatatccgagcgctttgaacgctttcgggctgacatccaatacggcattcggcagacggcctacatcatttttgtatacggtgataacctttttcggttttgctttcgcataagctctgattttcgttccgtttctcggaacgtcaaatcctaattttgtcgcgcaatcccagtgtcccagttttttaccggaagatccttttttaccgactccattataccatgtaatattaccgttcacttttttagcacttgcatcagaagagtaactgatcgctcccagcgtgcttcctgctaaaatcaataaggctaagaataacttcttcaagctttcgtcctcctgattctttattctaggcaaaattatacaccaagaagacgattataatatttcaatcactttacatgttcattacaacgtgatgagacatgcacataacgacggcacaattacctgttctatataattccatggtaaattatactacaaaatttaattcattagcgttataatattcatagagtatttctgcattcaatatggactttttataaggcctattgatagttgcataatatgatatattttgagaaaaatcaggctttaggaagcaggcactttattccttttaaccgtggttcatattgatcatgtacctatactcgtttcaatcagactaggagtgataatcaatgaaagcggcaagatggcacaatcaaaaagacattcgaatcgaaaacattgatgaacctaaagcagaaccgggtaaagtcaaaattaaagtcaaatggtgcgggatttgcggaagcgaccttcatgaatatttgggaggcccgatctttattccggtcggcaaacctcatccgttaacaaacgaaatggcgcccgtcacgatgggtcacgaattctcaggagaagtcgttgaagtgggcgaaggcgtcaaaaattacagcgtcggcgaccgtgtcgtcgtggaaccgatttttgccacacacggacatcagggagcctataaccttgatgaacaaatgggattcttaggcttagccggaggcggcggcggattttctgaatatgtatccgttgacgaagaattgctgtttaagcttcctgaagagctttcttacgaacagggcgcgcttgttgagccgtcagcggtagcgctttacgccgtccgccaaagcaaattaaaagcgggcgacaaggcggcagtttttggctgcggaccgatcgggctgcttgtgattgaagccctgaaagcggccggcgccacagatatttacgcggttgaactttcaccggagcgtcaggaaaaagcgaaagaactcggcgctatcatcattgatccgtcaaaaacggacgatgtcgttgaagaaatcgctaaacgcacaaacggcggcgttgatgtttcttatgaagtaacaggcgttcctgtcgttctccgccaggcgatccagtcaacaaacattgccggtgaaacggttatcgtcagcatctgggaaaaaggagcggaaattcatccgaacgatatcgtcatcaaagaacggaccgtaaaaggcattatcggataccgtgacatcttcccttccgttcttgcactgatgaaagagggctacttctcagcagataagctcgtcacgaaaaaaatcgtgctcgacgatctgattgaagaaggcttcggcgctttaatcaaagagaaaaaccaagtgaaaatcttagtcaaaccgaactaaaccgttcagctgaatatcagacacatccgaaaaagagccgttccggctctttttttcatctcatcgcctttccttccttttccttttaaaaatgaccccctctgcgcaaactattttttaccctgtcccgtctatccttaggcagcagcctatgaaacgtatttttaaaaaaggagccctttgaagcaatgaagaacgaaacagccaaagcgtcgcttgtgacgtgcataactgagcgcaaggaagacttttaccggctggcgtacagttacgtaaagaacaaggatgacgcgttagatattgttcaggaatcaattcaaaaagcgctgacatcggtcgaatccgtcaaaaaccccgatgtgatcaaaagctggttttataaaattttagtgcgcacggccattgattttctccgcaaacagaaaaaactgaaagtgatggacgatgaaacgatcgagtttttaagccgcggaaaggaagatcactacaaagacacagaccttcacgaagcgcttgatgacctgccgcatcaatataaaaccattatcattctgcgtttctttgaagacctgaaattagaagaaatcgcggacatcacgggggaaaacatcaacaccgtcaaaacacgcctttacagggggctgaagctcatgcgcattcagctgacgaaggaggatctttcttaatggaaaagagattagaacaattaagagaagagtataaaagtgtgcccattcctaaggaactggacagcattgtcgaaaaagcccttcagcagaaaccgaagaaaaaacgaatcgtgatgtggccgacatccgcggcagtcgctgcggccgtcttatttaccgccgttgtcaatatcaacccggatgccgcacaagccatgtctaaaatccccgtcatcggcaaagtcgtccaagccatcacattcacggagatgaaggaagaaaagaaccaatcaagcattgatgtgaaaacgcccgctctgtccggcctttccgatcataaactcgaagacagcatcaaccggcattatatgaaagaaagcaaagagctgtatcaggaatttatgaaggcgacctcaaaaagcaaaaaaggccaccttagtatttacagcgattatgaaaccgttactgacacagcggatttgatctcaatccgccgtgatatcgaaaaaacgcaagcttcatcttatacgcaaagccgttacatcacgattgataaaaagaatgaggccgtgcttacgttaaagagtttatttaaagatgaccgttatattaaagtcatcagccaaaatattaaagaacaaatgaaaaaacagatgaaagaagatccgaataaaatatactgggtcgaagataatgatatgtcggagccttttaaagccatccgcgccgaccagaatttttatattacagataagcacaaacttgtcatctcatttgacgaatatgaagcggcacccggatatatgggcgtcacagagtttacaataccgacctccgtcatctccaagctgcttgtcggagaccgctacatcagataaagaaagaaaaaaatccatgatatccgcagatcatggattttttctttcgtcccgcaacagccaagatgcacaagggacccttttcatataacagacgccggacgggggctgaaaagtttaagaaaatcacagcatttcattcattttttctgaaacaaaatccccttccgaatgcgtctaattaacggaacaaatggaagactgtacagaaatctgccatagccatccgcaaaacagcgagaatttccgcacacattattggaggaataccatgtcagacaagtcactgcatcaccgctatattcccggactggatggacttcgcgcctttgccgtcctcgcagttatcgcatatcatctgaattttaactgggccgacggcggtttcattggtgttgatatcttttttgttttatcggggtatttaattacatctattatattgcctgcccaaggcaatgccatcacccttgatttgcgtgatttttgggtgcgccggatcaggcggcttctgccggcggcttatctcatgattatcacgacggtcatttgggtcgtattgtttaacagcgagctcctgcataccgtacgcggggatgcggtctcctcacttttttacataagcaattggtggtttatctttcatcagctttcttatttcgacagcttcggctccccttcgccattaaaaaacctttggtcgctggcgattgaagaacagttttatatcatatggcccttcctgctgcttgcgggaatgtacatatgtaaaacacgggcccggcttgcggccgcggtcatgttcctcgcgttatgttcggcagtcgtaatgagtatgatgtatgtgcccggcggagatccgagccgcgtttattacgggacggatacccgctcatttgaattgctgatcggctgcgctttagctttagtgtggccgatgaaacgattatcttccaaacggctgccgagcagaatgaaacacctgcttcacgggacggagcttgccgcttttgccgcgctgctgctttgcgtcttttacacggatgaatatgaacccttcctgtacaagggcggcatgcttttgatcagcatcaccgcagcggttcttgtcgcatgtttatgccatccgagcagctttttgggacatgttctttcatggaagccgcttcgctggatcggaacgagatcatacggaatctatctttggcattacccggttatcgtactgagcacacccgtgcaggaaatcggaaatccggtttattggcactgcgccgtcagaatcggtgccactttcattcttgccgagctgtcttaccatttcattgaacagccgatccgcactgcgggcttccggccatttttacgccgcgtgtttctgaaccgctttctggaatggaagacgtcctctgtcatcagcagaatgtcgctcggccttattcttgccgccattctcgtatttgcgggcgggctgtcaggaatagccgaagagaaaaaacagccgcaatggacgtacgcgcaaaatgatcagcaagaaaccgccgcctcttcgcacaagacggccgatcacgatcaaccggcaaaagaagatgacagcaagaaaaaacacagcggcgaaaaaacagacaccgcgtcagacaaaaacaagaaagaaccaacagacaaatcaaatacaaagaaaaacgaagagaaaaaggaacggtcatctcaaaaaacggctgatccaaaacaaacacagcctcagcaagacgtgctggctatcggtgactcggtgatgctggacattgcgtcatacctgcggcagtccctccctcatgtcaccatcgacggaaaggtaggaagacaagtctctcaagcactccagctcacttcggaatatgcgtcatttaatcagccgaacaaagcggtcatcatcgagttagggacgaacggctatttcacaaacagccaaattgaatcactgatcagctccttttcaaaagccgatatctatcttgtcaacacgcgtgtgccgcggcagtgggaaagcaaagtaaacgaatcattgcgccggcaggccgagtctcgcaaaaatgtgacgcttgtcgattggcacgcaaaagcattgcagcaccctgaatacttcacaccggacggcgtccatctcatacctgaggggtctaaagcgctgacatccctcatcgttcaaacaatgaaatcatgacaaaaaaaagaggccccaaaaaggcctctttttcgtatatcgtcaggcaagcttctgtccgcaattcgggcaaaaattcgcgccttccgttttcgttccgcagttcggacagaatttcggcttagccgctccttccgagccgtttgccggtgccgtcccctgattctgctgactttgatcttgctgcggctggttctgctgattttggttcatttggttcatcatttgatttgccgcattcattcccatcatcatgcccgccatgtctgaggcggcgccgcttccgttcattttgccggatgacattccgtccgtcatggaaatctgctgatagcggttcacatcgcccaccatgccgtaagaagcgtttttcgtaatcatatcctgaacttcctgcggatagttaaagctcataatattgaagcccgtaatcgacatgccgtctccgatcagctgcatatcaagatcttcttgaatcccttttccgatttcaaaggaattcgactgcagattgaacatgtcttttccttctctggtgatccatttcatcaaaagctgatcgagaatagacgtaatccggattttaatgtcctccactaaatagctgtctttgacacccgcaatcttatcaatcaatccgatgtagtcaatgaccttgaagttaaatgtgccgtttgcgcggatcggcataccgcccggcatacctgccgccggaatattgatggcgttttttgtgccccacttcacggtgaactccttcgtattcacgaacagcacttcagcccgcatgccgctgttaaagccaaacttaaacccttttagtgtagatagaaacggaatgatttctgattcgatatcataatcgccgtcatcacggaaaattccttcaatcttcccgttgtataaaaagatggcatcctgtcccggccggatgatcagacggctgccttttttaatttcacggttgttccatttatagaaaaccatgtcatctctgaattcttcccattccaccacatttgctaactgatttctgaaaaaacccatgtatgctcaaatcctttacatataatttaaaaacttcccttgcttccgctgtaactcgtgccgcccctcgtgactccgccgtcattgtcattatctttatcaggctttttttctcttgtaacgtcggttcggatatatgtgtcgtgctggctcagcacttcagacgtatcgtgatccatatacgtgctgccggtgacggtgaccttgccgccggaattgtacaccatcacagtgacggtgattccggccgcggctgcggcaataatgagctgaaaccaccatgtgagcagcagattgtcagacttgtcgtccgggcttttccccatatctttataagccatcttgatgtaggtctgaaacgccttttcataatggcctgcggaaatatctgacgagatcgtatttctgatcgtattcagccggctgttattcaaatacgtctccgcctttttatatccggagataaatacttcccgctttttcatatcaatggtcaaaatcgccgtgcttccgctaaaatgactgtcataaaaatcaccggcgtactgctcgatgtccttaccgcccgttccgtttgcggtaagaatgataaaatcggtatggcgctttgccccgagcttcccggccaattcctcaagtttcttcgtttcatccttcgttaataaatgagcattgtcataaacatattgcttctgttccgcggcagacgccgatgtatgtaaaccaaaagacagcatcagaaaaaggacgaagcagaagagacacgctttttttatcgatactttcatcaaaaaccgcctcctatcataagtgagacgagtcttaatgctaaaaacgcaccggcggttatgccgccgaaccacgcggccacttttccggcactgatcggcggtttgccgacaaccttgcccgtctgcccgttcatcgcaaaaatgtgttcagcccgctcatagtcgtagctgaccatccagaccggaagcagtacgtaaaagctgctgattttatcggtctgaatctgctcatccgtaatgtcagccgtcgtatatccggagaaggtggatctgatataagaatcaatataatggctgattttatccttcgcccgcggaaagagatcgtcatcggtataattgtacttttccgcaatatatcccgctaaataggccgtattaaactccttcagctcactgtatgagtaaggctccaatttgtccattaattcatcattcattttttctgaagcgtcgaccggaattttgagataatcaagattgatatcgcggtacgcgttgtaatactcggtctccgtcacccggtattctccatcatcatagtgatgcactttcgtacaaacggcattgacctgaaccttgctgtttaaatcaaacatccaaaacggcacgtacatgcccgttatgctcttcacccgatcggcagacataaatcctttcggtgtcagacggccgtttcggcaccactttttaaaagcgctcatggcttcttctttactgatcgtaaaaggaatcaccatcgaaggcgcgagatttcccgataatcggtcggcgagaacggcggctcctccgcaaaacccgcacgtcgtggccgtcgtttccgcctcagtcattaatactgcgccgcagttctcacagcggtactcgttcgcctcattttcggaaaatctcgtcgttatatactcttttggcaggctttcaatctgatcctgccgcccgcagctgtgacatgtcagcatgccggatgaactgtcaaagaccatatcatcgccgcagttcgggcatttataagaaatgatcattctgtttctctcactttctctttatatcggacaaagctgcagcccgctgtctattgatctttactgaaaagcattttctgcttaagcgccgccaattcatcatcgacactgctttgattgctgtcatatttagccgtcagatcgtcaatatcgtctttcggagacgcgttcagctcagccatcgcattggcatgatcaagcgcttggttgaccttgtcttccattctgccgaaagccgtcatcgattggcccgcatttgacacagaggaccccaatttgttcattctctcctgcgtttttgccacagaccacttcgctttgatggcatttcttcgcgactcaagctctccgatatcagcgacaagcttgtcatgcattttgcgcatttgagacgcgttggaagaagcgagctgataagccgtctgcagctcggtcagtcttgattcaacagccgctttcctttccaaaaatgtccgcgcatcggcttcattgccggcctgcaacgctttcatcgcataactttccatcttttcggcatcagcctggcattctgttaacgctcttttcgcccgctgttcctcagccatgacagaagccgtctccgctttcacttttcctaaatcactgttcagattccgcaaatattgatcaaccattttttcagggttttcagctttgtccagtagcgcattgatattgcttgacatgatgtctttaaatcttcctaaaatactcatttttcattttcctcccaaaattaaatagtaacaagttcatagttatctatactgtttttttcgaaaaaagtttcattttctcttgaatttatgtatttttatatgaaaatagtctcattcagcccatttgtgccggcggaaattctttatgaccagatacagtgagaacaaaaaataaacaaacagcccgatcatcaacccgctcactaacggataatgtttcgcagcatacacaaagaaatcaaactgcgaaatctgttcaggacttgtaatcgtatccgtcccattcaaaagctttgaaaatttcgccgtatcattccaatcaaacgaatcagaaacaagctcactcccctgataccaattgacagcggcgagacaaagaaaacaaaaaacagaaaacgcgcattgcacaataagaaaaacatgtttcatgaaaaacattcctccgcggttcaatatcataggccgtcatactatacatgacggcagcagcagaaacttggttttactcagaactgataaaaacgtgattgtatgtacttcacatcggttcaatttactggatgcctttctaaagtataccgtatatcgtaaagagtttcagacctaaataaagaggatgcttcccgaagtccgatgactttcaagaaacatcctccatactttacagtgatacttcaacctcttttaaactcggcagagcatcgatcgcaccgattttggtgcacacgagcgcccccaccttattggcaaatgagacaatatcacgcagcttcgcaaaatcttcggctgccgtctgaatctcatccgtgcgcgccagttgaaacagcgccgcgccgacaaacgcatctcccgctcccgttgagtctattgatgtcaccggaatgctcggaatgatgtcaatatccttcccatttgaaagaagggtcccgcttttcccgagtgtcaccgccacaataccggccccgagctcatgaagaaccgcaacaccttctttatgatccttcgcaccgctgatgatctcaagctcttcgtcactgactttcacaaaatcacttacggcaacggctttttttgcggtgtttataaactctgaaactcttcctttccataaatcctcacggtagttaggatcgaaggaaataaactgtccattgtctttcgcaatcgacatcagccgtaaataggctgagcaaaacggatcagataacaatgccgtcgctgatccgaaatgaaggattttcgcatcgtttaccttttccagatcaatatcatccagcgttaacaaagcgtccgctcctctgttaaacacaaagtcgcgctccccattttgttttaatgaaacaaacgcaagcgttgtaggcgctttctcatccatgacaagcatagaggtatcgacatgtgcggcgtccaatgtctgcttcagaaaatacccgaacggatctttgcctgtttttccgctgaaagccgcgtctccgcccagcttagcaatcgctgccgacacattcgccggtgcgccgccggcactttttaagaaattgcgcccttccgtcaaatcaacatccacatcggtacaaaagaaatcaattaacaattctccaatacaaataacagattggcttcccacattatcacactcgtttatcaattctcaattatagtttcagtatagtgctttctgtcataaatacaaccgtttacatagaatattttaaattttacgtatacttatcttgcagctctttgctccagatcagacatcatctgctgatattttttttcagttaaaggataaaaagaaataagaataatagacagcagaatgaacaatcccggaatgagcgcattcatatttttaatcgcattcaatgacgaggccgtctgatcggtattcgcggcatatccggcgattccgagataaacggccgaaaatgacccggctaacgcaactccgagcttattgatgaaactcatactcgaaatcaccacgccatcagcccggactccggttttccattccgcataatcgacacaatcggcaaccattccccaagcaagcgtatttaaaggcgttgtgaaaaatcccgaaacgaaaagccaaaagaaaataagcggcagcgaagaatacgatgtaaactgaaggcccgcataagaaatcagcgatagcgccgccgtgatgatcataacctgcttccggccccgcttctcagaaaagaaaggaataaacagattgctgatcagcgccgcgccgaaaaataatacagttcctaaaaacacaaattccttatggctgacgttatacgtaaaatagtacaccatcgtgctgagcttaatgttaaacccaatcgcaaacgccaaaaatgcagaaaccaaaatgagcaaaggcttgtttcggaacaaaacggacaacgtttttttcattccttgtttttttcttttttcaggctgaatccgttcccgcacagtaaagaaactgaacaaattcaatgcgatgctcaccgccgcatagataagcgccgtcatctgaaatccaaacgcctgattctctcctccgatagcagttgcaagcggtgtcgcacaggaaatggataacagaatgccgatatacaccaaaatcatccgagttgtggtcagaaccgtccgttcctccacggaattcgtcatccgccccgttaagctgttgaccggaatcgtctgcatgctgaaggacatcccaagcagaatataagtgatgtacgcataaaccatattccccgtctcgccgaaatgaggggtcgtgaagcataagaacgtaaatagcgcaaaaggaaacgccacccacaaaagatacggccttgcctttccccatcttgtattcgtcttgtctaaaatcacgcccataatcgggtcaaaaacagcgtccagcacccttacgataagaaacaaagctgcgatgaccgcaggcttaatgccgccgacgtctgtatagtagaataataagtatgcgtttacaaactgaaagataatattgtacgacatatcgccgaatccgtagccgatccgttccatccaggacaggccgcgatatttcgtctttactgccgctgctttttctgtttcaatcatcatttcccaccccaagaatccgttttcatttttgataagcaagagggagaatgcaaagatcctccccgttcactcagcgatttggatacaccatcacttttaagcattcatttttgtattgaaaggcccgttccatcgcctcttgcgtctgctccagcggatattggtccgttacaagatgcttcgtgtccactatgccggaagcgagaaattcaattcccttcggatacgtattcgcataacggaagattccgtatatatcaatctcgttatctgcaataaacggcacattgagcggaatctcgttctgagaaggcaaaccgacaatcgccagttttccgccccggcgcacggaagccagtgcggattgcaatgccgccggattccccgctgtttcccaggcagcatcaacgcctctgccattcgtgatcgttttgatttcttgaccggcatcctgttcccggacattgatgacatgcgtcgcgcccatttttttcgcggcatctagccgcagcggctccaagtcggtcacaatgattgtgcctgccccgtatgctttcgctgccgcaacggccatcagccccacagggcccattcccatgatcgcaaccgttgaaccgggctgaagcttcgttctcgcggccgcatgaatgccgacagaaaacggttcaatcaaagccgcatcttcataggaaagtgaatccggaattgaaaaaacaaagtcctggcgcattttgatatattggacaaacgcgccgtcaaccggcggtgtcgccaaaaactgtacatccgggcaaagattataacgcccttccttacacgcctcacagcgtccgcatgtgacaccgggttcgacggcgacacggtctcccaccttgaattgatcgacagacgatccgacggcggcaatttctcccgcacattcatgaccgaggataaatggtttttccactacataattgcctattctgccatttgtatagtaatgcagatcagatccgcaaattccgacagccatcaccttaatcaacacttcatcatgattgatgtcaggcacgggcaatgtttcgattttgatttctctcgtgttgtgcataaccgcagctttcatgttttgaggcactgtgtgagtcatttggcaaaatcctttctctgctctgaaatgtaagtgcatacatttttgttttctctgttactgcccctattttatctgcttttccatacgttcaacagcctttcctgctgtataaaaggacagccgcactgtactttttattttttcatatacaaaaaacactgaattgataaaatagtactaataggaggtgcaggctaatggctgaacttgaaaaccggacacattttgcagaactgctggcacctgccgtcaaatcgctgaaacatcatcctgattacaaaatcaaaaggacaaagaatgtaaaagcaggacagtcttatatagatcaaatcgcactccgattaggcgtttcctctaacacgatcaaaagctggatcggacagatgggcgcaaactacattcccggacgaattgatgacggaaagctgttcggcatgatctggatcattatcgaaaagactgatatggattctgaatggctgaccgatcttctggaaaccaccaccattcccgtcatcaaacccgcattgcccgtttggacggcgtcttgtctaaaaaaagcaaaaatactccggaaagacggatcattcggaacgccgagtgatgacgatgttgaaaaagcagtaaagcggctgtttcatgacagaccaagccacgaaacgaatgcgcttacaagaaactccgtcacgcataacttaccgtcacgccggacgggaaactttatcggccgcggctttgatatagaggcgatccggcaatggatgctgtctccgtcaccggtctgtttaatcaccggctgggccggcatggggaaaacaacaatcgctcttgaagcagcctacctttgtgccggcggttcaccagattggttggcattcaacagcatcatctggatcagcgcggactggaaaggattgagcttcagcgattttttaaacacgatcgcctatcagctcggacgcaccgaacaaatcgacaaatcaatcaacgaaaaacggttcgtcgtccgcaatgcattagccgctcattcaaacgaaaaaccggtattgctgatcgttgacggcattgatacagcggaacgtcacattcacgaatttatcatcggccttccgcaaggcgtaaaagtcctccttacggcacgggaaaacgtaaaacagacataccgggacggcctcggggaactggcggccatccagctgagcggccttgaacaaacagatgcccttgatttttttcatcaagaagtgaaccgctgtctgcaaacatgcaacctcccgcaaaaacgggaaaagctggagcagctgttggagctatcgcctgaccttaaaaatgaattcatcttagcagccgccggcaacccgaaggccatggcactgagcatcgcttacatgtcagacgacgacatccccgctccgcagctcattcaagaacttaaacaagcgggctactcattattggaattgtttgaggttctctttggccgcacatgggacagatgtcatgaagacacacgaaaactatggcagacgctttgctttttcgctaagccccctgatgaaaaaagcttggctcaagcggccggattagacgtccggcggtttcattacgcgattgagcaaatgcggtcatatgctttaatacagccggaacgaagcgcaggaagaattcaatacgcagcccatcaaaccgttgtcgcttacggagaacagcacttatctgaaaatcatgattttgcaaaagaagcccgaagccgctgggcgcattattatatggattatgcggaaacccatataaaacgggaacagcccaattccgtctattggagctacttgctgggacggaatttagagcaaatgaaaaaggaatggccgaacatcctaaaggtcattgaatggtcgggcgaaaccggacaacatgacattctgattaaactcatcatccgcaccagccattttctaagcagaatcaacctgcctctgcgaatcgaatacggattaaaagccgccgatgccgcccgtcaatcaggcgaacacacgcgggaagcttactttcggatcgacacggcaggctgggcgctgatggaagtcaacgattcagacggagctctcaggcaaatagaagccggcctgaagatactcgaacaatcaggcgcaccggatcacgacgacttgagggtatggggaaccgccctgcaatcgaggctgctgttaaaaaccggagaaccggacaaagcggcagcaatgctggacggcatcaaagatcagcccgtctcgcccattatccggcacagggttcttctggtccgcggcgacctgagtttcgcccgctctcactacgaagaagccatcacattatacgaagcggcaaacacaaccagcgccgcatacggcggcgaaaaaacgatagaagcctatttcaacctgggcatggcttacgtgaagtgtgatcagctcgaaaaagcggaaaaagcctttgaacagatgctctatgacaaacacaacgcgaatcaggttgagttgatctactatcactacggaatggcacagctgttgtatcgtaaaggggagaaacggaaagcgatggaatcgaatcagaaggcgattcggctgattgattcgtgggagcctgggattgggattcggggtgaggtggagcagctgagaatggtgcttgaaggaaatggtgaagtcacattgtagttaggaaagtgtgagttccgtcttagataaccccctcacaccttatttataaataaggccttatcagtttactcaactgaaaaggtcttttttgctagaatgcatgagcaatttagatggaaatcaaatatccaacccttgatataacaagggtttttgctgtttattggcattattcctcctaacatcatgaaaaattagtttttaataaatatttttgaatcaatgtttagcagtgatgggataacaaatccgtcaaaatgataaaaccagtactagggctacactagaacttaataggatgtcaaactgtatgtggcctttaatgtttaaagctagcagtaagttgaatgatttccaactttgatatttcaagtgatattttatagcttaatttcttccgctaagaattttttagaaaaagtggtaatatccccttgaaatttaattgattatagccgattatatataggtattatattatataaattgggggttttaggtgaagaagcgactctttttattcatgtctttagtactatccttagtttttagcggcttgtagtagctcgacaaatgatgtctcacagggatagtgattcaaaaaataaaaaaagcttgagagactaaagatgactgttctaaaaaagtcgttgcaagcaaacaatatgctgaagcactgggcatgagttaatctgggcattataaagatcatgagagacaaggtaaacgtcggaatatacatcaaaaatacaactgacaaaaacctgaccttttatcctgaccaaggaaatgccgttattggcaattagctgcaaacatgttcttaactgatggagaagtccaaggcggaataaaacaaaaaggcgtatttgaattctctgctccagatgaaaaaaatgatgttgataaagtcaaaagaaattaaattaaactttggagatgttgtcacatagacttcatgaaaaataaagctgtatcaattacagtaccagttaagtaagggagagtttaataatgaaaagaacaactgaatttgttttaggattattgggtggaatttttggttttattggagcgatcatggcattgattattggtggacttgatgcctcttttaattcaagcggtacaagcgaaatcattggtttaggctggggagctgttgtcttatcaattttgggtattgtcgcttcggtagtagttaagaagaaacctaaagtcggaggagtattgcttcttatctcaggaattggcggagtaatttgtatatcaatgttctatttactgcctgctgttcttcttattattccaggtatcatgggacttgtcagaaaagataaaacgacaacaacagcagcttaaagaaaggcccttaacagggcctttcttttttagccaataaaaaacaaaagttcccgatatattaaatttgaattatgaaagaggatgcctcccacaaagtccagcagacttttggaaacatcctcagtttcgggatttcataaagaaatgttattttttcggctaattggggtgatgaaaaacggtcaaacccttggtgtatcaagggttttttccgtttgattacatcatgccacccatagatcaatcactttcaagaacatacattctcattcatttgggcaattcaatatttgttttttcgctcgatcgccctcatatctctcattgatattcatatttggatttataaagtgtgaccaatcgtgtgaccaaaattgaaatcagaaactaaattcgtttatactcccgttaggagttgattcagaatgaccgattttgagcgtaaagtgtatcggattatttttaacatgagccgctttgggaaaaatccctccatggaacaattgaaaaggaaaacgggaaaagatgagcagacgatccgtgctgctgtgaagaatttgatgaggcagcgcgttttgaagtgggataagaaaaaagaagagtggattttctaactttacattgacaattccataagaaaatagtataataatattaacagagctcacacgcctcttgttcttcggaataatgcggaccacagtgagacttttttttatctaaaggatggtaaattatgtcaagtgtacatacccctaaagtctttaaaacacatgaagaacagcttgaaatacttaaacaacgtggtttaaaagttgatgatgacactgaagcattaaacaccctaaaaaaaatcaactattaccgtttgacaggatatatgttaacgatgaaggtaaacgacgaatttcattcagacgcttcatttaatgatgcagtacgcttacataattttgatgagaaattaagaaggattttattgagggctattgagtctatagagatttcatttaaagctcaactggcatatagttttgcagatacttatggtcctttaggataccttttttcagaaaatttcaaccacgatcaaaaaagtaaaaaattccatggagatttcattgaaaaattatctaacacaatcatgaatagcagtgatctttttgttgttcatcatcgtaaacattataatagtaagctgcctatttggggcgcagttgaattacttacgatgggcaatatatcaaaattttataaaaacatgcacagcaaagataagaaagtaatctcaaaaagcttatataatggactttcgcatgccgtgcttagtaattggcttgaggctattactatattaagaaacacatgcgcccactattcaagagtttataataaaaaattctcattttcgattagactatcgccaaagataaaattaaataacagcaagcttgtttcatttatttatattttgaagatattgttgtctaaacaagaatggagtaggtttcttaatagttttttagttttaacagaagagtatgatgatgtaatagaaatgcatcatatgggtttctataataattggaaagaatatattaattgatcccccaccgaaatgggggattttatttattttaagagtgattcaagttttgctttcgtcttcggcccgaaaatgccatcagcagtcaggccatacatggactggaatcgcttgaccgcatttgctgttttcgagccatatgcgccgtcgattccaaaattctttgcgctcttatctgggtagtaatgaagagccgccagagccgtttgaatctgttttacggcctcccctcgggtcaatgggcttgtgactttaaaaacacccgcaggcaggctgaattttgatttttgagtggatttaggctttgacgatgttgctttcttcttgccgccgcttttcagctcgttatcgcttttgatataggagacattcacatatccgtggaatgtctggccttttgaattggtgtattcaacatatccccatccgttgacagttgatccaagctgatatttcacaaccgtaccattcggcaggttaagcaccatggaagaagaagcgctccgttgcgtacgtaaaacaaggccgtcacttgaaaccaccgtgtttttgataaaacggcctttattcgaatcggtgttggttttcgatttgttgttagttggtttgttaattactaccccacctaatcgcgcttttactccattcttgaaatcagtaaacccttgggatctgcttacccatggggccggacagattttgtgtgtaatgtcatagtgccgcacgatgtcattgatcggatcaagtttatacattttgcacagctcggcacaaacttgttctgcgcgggcaatggtatcaggatggaaagtgccgttcttttcaatgcaaagctccacgcctatagataagaaattcgcattcggtttcagtgcagcgacgccccggtaaggctgtccgttgacgaattgctgaacgtcattcgcatgataggccacctcattcaacggaatgatgcaaatagcctctgtacgatcgacaaagatgtgggccgatgcaaacgtctgttttttctcagatagatttctgttctgtgcggggagcgtttgaccaaagtatctataatgattggcagcaggcgcgccggggttggccgtgtaatgcaccacaagtttcttcacgccgttgtttttgattcccggccgcgtccatttattaatatcaatatattggtttttaaatgctgacataaaaaatctctcctattctgttttgaaatataaaaaggccgccgaacggcagcccttacttggttaaatcatgctgttttaaaacggctttttgcttatggcctttttcagtcacatagttgtttttgaaccatgctaccagtgacatgatgatcgtaaaaccgatggagccgcctaaataaaccgcgtccgcaaggtcattcacttgatcatctgcaatcggtagcacatccttaccaaacatcactaaaacttggtttacgagagcaataaaaagaagcacagtccggacgactgtacctttgtcgaattttttcatatgttattttcctccttatttttgcagcaggttatacatgatcgcgatagccccgccgataaaaccggtgctgactgccgttattatggctcctgtgatggtccgtttgatccaagtcgtattttcatcaattttgttcagcttttcgtttaatgaaatgatttgctgatcatgcctgtctgaagaacgctcaaggacactcactcgctgttcaagagtcttttgcccggctttaacctctgttatttctttttgtaaagcattcacttccggtacctccgtcatttgtgacattagtacgcccccctttttctatctcatacgcttcacctccttcgaggcaaaataaaaacacctattcagttacaggtgctggttcactattattttctttcgccgctactgtcgcatttaattgcttttcgagttcctcgcgtttattatctgcaaacgtgtatagcgctttatattcggccagctcattattcttcagattcaattcctgctgtagggaagcagctttatatgctgcaatttgtaactggtcctgaagttgctcttttgtcatttcttgcatgcctttcactccttactcttgatcgggatacgcattaccgcgttcgctttctgtaatttcatcatattccgcttgtgtgatgcggcctttctcaacggcttttctcatttcaacggtcaaaacagttccgtttttccagcaatcctcaaaaaacccgaaaagagcacttcggttctccaatgggctccccccgtttccttttattgattcattaagagattgcaaacccgctgaaggtcatggacttgctcctgcaacttttcctctgtagtcttttccttttctctatcttttgcttcaatatttaataccacgggctcaagcttcatctttgccatcctccttattttgaacgtagattgttataagcccctctcggttgccttgtggatcaacgacaatttgaactggaatcataataagctttttgctcccactgtacccttggtaataaccatcaggctctacataggtttttgtgagcaaatagcttatctcatcagactttatatcatgaaggacatataattgatacgctactttggttgtatcgtccggctgcagatcgaacgaaacagcctccatgggatatgtcttgtctcctttttttatagagccggcagttatttcgattcccgcgctggtttcttctatttcgatgccgtccgcataataaagactcatgttaaaatcccttttttcaatcataaaaattactcccttattgtgattcgtaaaaaataacaatttgaacttttatcgtttttcccgcaactccggcagtagtcccggtccctctcactccaatatcaacagaactggcacttatattttctaatcctaccgtaaccgcattagaatatgcgccaatcgctgtacctaccgctgcaaaaacgttctcaggcgcataataaaaactatcaacaaaaggaatgcgattgtagcgcgcgtacgcagttgcccctccgtcaggcggcagtttaatgtcccaagtaaagcagtaaaccatcaaaccgtattgcaggcctccatgcttgtcttctaattctgtagaaacattgccacccatcaatttgaattcgcaattttttgcattccctgctacaactttggttcccaatggtagcgttaaatctgatgcgtcaacaatcgttttttggcctgatttcagtcgaatgaccccggggacatcaatatctaaattattcggtttaaagcgataaatagtagctgatccttcaaaaagggcctgataacggttatatgtgaacggctctcctatatttttaggattggtagtagcagtaagaagaaaggcgtcttcttcaacagctgcctgtctttccattttcatattaaaatggcttataacttgtccaacatctcctatttctgaatacattgaaatagttggaaccgtttcatatgcggtttgctcgcctgcgccacggagctcaattttgccatcaccaattgagactgttctgtagatttcattagaggaatcaccaggatcgtaaaaccttccttgttcctgcgttattttcgcagaactaacaaccaatttgttgtaatcataatgagagtctctggtgaattggtaaatcttatcaccttcgatatagtattcggcatcttctgattgtgtcagcgcctcgaaacgggccccttttatgtccacaccctctatcgtgataccttttaacgtcccgacgtttattttgtccgctgaaaggtctttgatcttggcgtttgttattgaaccgtcaatgatgtgtaccgaatcaattattgcttcttttagatgcgcctttgcgatagccgcattttgaatagccgctgtcccgatagccgcttcagctactttcgcacttgttatggctgcattttttatatgagctgtttctattaccgccttttggatgtggtcgccatcaataacaccatcaaccagctgagtatcaaacgggctataaccataatcagaaataacatcgcctttgcgcacctgtactttacgaataacaaagctacagggctcagtgtttccgtttcgattatatccgccgattccaattgtgtaatcagagccggtttccggagcagtaaatttgatattaacccttataaattggtcagacggaaaagcagaaatatctttctgttcattgctgctaatctgtatgaaagtgctgccttttttcaaatgaatataacttatgtcggtggtattattccgttttatttcaaatgacagtgtatattgttgatctttgaccaatgccattctttgaatattaacaggcgaggacctgttcccgcatattccgaaagctattctagttgttccattgatgatctgagaaacagtcatttcattaaattctttttcctcaacactgtggctggtgtccgtataatcatagaaccatttagattttaaaagagagccaggtaagatattagcatcatcaaagtttcttgaaagtttatcagcatcaacggccagctgggccagtttttcctttgtgatcgctccgaaaacaatgtcatcagtcaaaatgcgctgagtggtcgcggaaaactgatccgtgaattcgctcgctgtgcctcgtgtgttgattgagcgcaagcgataataccaaacttcatttactcccgtaaaatgctcatatccgcctgttttgcctctgaaaatacgattctcttttaatggagtgaatccatttacttgtgaagcatatacctcataggctgcaatataactggacggatcataatcccatgtcagggccacattctgaaacattgccttgatcactacattcgacggaactggcggggctttgtcagggaaactgccatccgtaacctcgccggcatccggtttactttcccaagtaccgcgatttttttcaattacgctttcaatttgatcaatccggccatctttttgtaatgctgataaaaattgaccgatctctacgacgcaagtattttctgggtcggtaatatcgtattccattgaaataacgcgctgcgatgtctcgattggaatagcgaagtttcgatcaattgcgatcgttgtatctcccaattccacatgttcgtgttcgtggcccggcacgctctcaagcagttgcacggacagctcataattgatttctgtcttacatgcagttgtaatcaaatgattatatgtggcctttaaaagctcttccggctccgttatgtcttcatcattgaattggccttcccgatggatcaactttccatctttaaggcggcccaatcgttctaataaatccggatcgccaacccattcctggcctaaaggcttatcgaccgggtcgccttttgtttttttccattctacttcagagaaatcaataaaacgggaataaccgcccgtctcctctccttcctcatcagtagatgctatggatgctccgtaaccccaaagggctgtcaccgggtaactgataacggtccgccggatattcgttgtatccttatcactctcaaagcgcttcccgctgtctttaccgcgacggggaagtatttttatgattcgtttaacgacctgatttccatcaaattctatagtgtcctgaagctctccgccccatatgttaatcacgtcagcgatacaatccaacgctgtttttttatagaaggtagtcgaattcactccaagctccgccgttacttccgccacccatcttgaccgagaaagaacgttgtccagtacaaactgagcagttttattggtagggcgaaaatcttttacaaaggtttcagcaagctccatcatggcagcttcacaggtaacctgagtgttaatctctccttcttcacttgtatcatccagttccttgatgacaaacagacgcattacaccgtccttatccttgaataccacttgattctcttcgaataggaagcgcgcgtcagggtgggaggcatcggctacaaaagaaaaagaagagcccttgttgagctcttccttgtattttgcatcccagaacgtacaggtttctcgtccgtggctggacagcactgtcaataatttatcatctggtgaaagtatataaatgtcagccatgaccggacctccttacaaatatgcctcattaaatttgatactgctcttatgactgaacttgattttaactggcgtcctgggcggcagcagaaaccaatctgattgaatttgaagtgctgtcatgattaaattaccgctgcaagtgacctttctttttgctgaatcaattacaagtgtgtcaccagcgatgaaatcgtacagcagcttgatcgttttcgatacagacccatcatcattaagaagagccacctcatatgaagtggctttctcttcaaagacgcattcgattgtcgggtctacggccgcatatcccggattaatgatagtctgaatacctgaattaaattcaaaatccttcgccgggccgtatttttttgggtcaggacagataaaagtcaatgttgcagtctgaaagcctccctgttcttcgccttctgaaatgctttcaaagacagcgttatagaatctgtcgggctcatcatgaaaaattaacggtttaggctcttcagtgtgcagaataaaagtcaattcctcctgctttttcttcaactcttcttcactgctgaaggcaaaaagaacctcaatggttatgactcttacagggattcttgtgttccgcaggaaaccgccggggcgattcccgatagtggctgtattcacttctcttcctgtcactccccggccgcccgtggtcttcacataaaagaagggtgatatatcaataccatcaaacgtgattttccattggttaggcagtagttcctgataattgatcaattaaatctcgtcctccttgcgttcgaccttttctgagcgtctgtgacaggtttttctacgccttgaccgaccttcttgctgtccagctcaacaacaatcattctgtcaggcaattcaaggttccggatgtccgcgctcaattcttttctaaccgtgccgagttcgctgctagaaatggatgtgtcatatgcaaaattcagatcctcctgctgaatagtcatggcatcactgacggctcccatagctttttgaacagtgccgataccattctgaatccccacagcgataccagcaggaaccatgatccccacctgatcccgcatcagtctggatggggagtggattttcaattttttcttaatggttttctcaattgtcgatgcgatggagtttgcttctttcgccaactcgcccttcatgttcttcattccagaaataatgccggccattgtatttgatccgatggctttaccgcttttcttcagagaacccagctgttttacatccactgtaagctccccaattttgcggagatagtcatttttcagaagtgccagttctttatttgcggccgaccgtaattcatttattttcttggtcgtcgcgttcttcaacccggttaattcttgggtagcctggtcactggccagcttgtgcttttctttccacagactgacatactcatttagctccgaatctgtcatgcgggctattgcattaatctgatcagctgacccgacacccatttctttcaattcgtctgtgaacgccttcggtgcccggcttgctatttttgtgatgtcagtgttgaacgttttgatcttgtccagctgctttttaagatttgaagtcagcttggagccgttcacattttgacttgagacatcgtcaaatagaccgatggcgttataaatcgcgtcagttcggtcttgcaactcctttttataggcatcgttggccgccttaatatcggcagtcagtttatcattcacttttttgaattttgagagataagtattgtttgcagaaagaatgcccttgttaagtttgtcagccgctttcttttcggcttccttctgctttctggccttatcagtcatagctttttgagtctgatagatttcccgttgaacctttatttgctggtcagaattcagcttgttcttcttcttgattttctcaagcgttttgatataggtattcccgctgatttttcctgtatcgtattttgcctcagctttcttaatctgatctgatactttcttggtatacgccagtttcgccttcgcttccttgcgctgctgctctttcaatagcttcttctgtttatcagaggcgtttttggatgcctgatatatctcgcgctgtatttttcggttttgctcgctggtaagcttgttttgcttctgaatcttctgcaatgttttgatatacgtatccgcgcccattttcttggtgtcatacttcacttcagcgttcttaattttgttggatacctttacctcagccgccttctgagctgcttttgctgcttttgccgcggccgcttttactttggcctgtgatttatcaataccagccgccataccggtgccgacgtgataaccgacctggtcacgcattacccttgacggagaatggattcccagaagttttttcatgccgttgggaatagcatttgccattgattttactttgctcgctaatgctcccgccatgccgctgataccttttattaagccttggatgatgttcttaccgatctgccacaagttaatgccgcggaaaaacttcatgacaccgttccatatgcttgtaattgttgattttgctgatttcattatgccggaaatagcatttttcatactattgaataggcttttagctgtactcacgagccctttccagagccctgtcacaaaacctttaacggcgttccacacgcttgtgaaaacacttttggtgccattcagcatgccgctaaaaaatgacttcaatccattccaaatgctcttggcagtagaagatacagctttccatactgtggtaacaacagtttttatcgcattccaaacggtgctgaagattttcttttgcgtatttagccaactggtgaagaatgttttcaatccattccagattgattttccaactgatacaacgcccttccagatcgaagtagcaattgttttgataccgttccaaatgcttgtgaatgctgttttcattccattccaaacagatgaaaagaacgttttcaaaccattccagacagacttcccgactgacacaatgcctttccaagttgaagtggcgaatgacttaatgccgttccaaaccgttgtgaacgcggttttcatcccattccagagtgatgaaaagaatgttttcaggccgttccaaatgcttttagctgccgatacaattccattccaaacagtagagaagaacgactttattccgttccatgttgatgttgctatcgtctttatacctgtccagacagtagacaaccaactggaaatagccccccatgccgcaattgtagccgattttaccgtgtcccaattcgcaatgatcaaggctaccagaccgatgacagccgccgtaatccatccgataggccccattgcgatgacccatgatgccgccatacgtgccgcctgcgctgccgcttgtgccgcaagcacgacgagttgccggccgaataaaaccatttgcttaccgcctgcaaccaacaaagatataaaattgctgatctgcgccgccgtccaagccgctgccatgcgggttgcctgtgctatggattgcgctgcgagcacggtcattttggcaatgaaaagacccatctgcttaatcccgtttgtcagcattgtgataaaagaggtgatcttcattgctgtccatgcggttgctgtacgggcagcacttgcgattgattgagcagccattacagtcatattcttgatccataaacccatttgaacaatgccgcgcttcagagcagaaacaaacgctgatattttcatggctgtccacgatgccgccattttcacagcattagctgttgcgcttgctgccatcgttgtatacttcgcaatgaattgacccatcgtgacaattgctgattttaattgggtaatcaatcccacagttctgatccctgaaaccgccgaaccaaagctccgcaaatattgagctgcagtcataaaatctttaagcccatttgtgacagcactgaccgctactatcgctggaacaatagctcttaaagcaccaattaatgaaataccagctgctataaatttcccgattgccgggtttgcctccatcgcagcattagtaaatttcaaaaacccgtttacattctccaaaatcgttttaccgagtggagccatgccaacaagcaagttgatgatagtcttcgcgatctgccccaatgtgctccatactgtagggccgttggttttgatatagtcaatgaacgattgaaattcttttgttttcgtaacgctgcctgcccactcattgaaccgcttggtcagatctacgagtgatgtcatcatgtcttgagacataggagcgaatccagtaaacagctttgtcaggccgcccgaaaagtttctgatgatctgtagcagtttcgggccgttggtttttgtatactccacgaaagcctgaaatttctttgaagaacccaagttcgctgaccatttcacccatgattgggtcattccttcgatggattttgtcatgctctttccggtcggtccgaatgctacgatcagattaaaaactgtccgtaagacattcccggcagatcggccgaatgaagcaaacgccttcggagcttctttgttcagataggaaatgaatctctgcatgtccggagctttaaaagctttgtccatgcttttcgccagtcccacgccctctttcgccagtccgtcaaacattggaatgagtgagttgagagcgagtttaaacgtatttagagacataccgaatgttttcaagatcggcttttgaaccatcgtaccgatgtcccgccagttgtctttaaagtcttcgaggttctttaatgcctctctctcttcttttccaagagatttttgcagattattgatctgtttcatgatcttagcgcgctcttttgcgcttgttgcattgtccagcttctcctgcagcttggaaaggtcttcggatgctttgaatacaccgcttatcgaagtaatagcaagggcgccgaatgccgccgcgcctgttcccgctgttgcaaatgcactggttaaccccattactccgccggctgccaccccgagcataggacccaatgagccgattaccccgacaatacttgcaagggctggcgagattgcagggagtagggacgttagtgccccggcaattgaatgaccgatgactgttgaaactgagtttgtgatcttggcaagtctgttcattgacgtttcaaaccgatcaattcgagcctctatactgatccatactcttctcggtaaggacgccagagcagcacgagccgttgccacagagcgcataagtgcagccgtgtttccgtttatgaccgtggtaattctgtttggcagtgaagccaaagctgaacggactgccgaaaccccgcgcatgataggcgacgtggccgcattaaaagtggtagttacgttatgagatactgatgctatggctgaccgcgcaacagcgacagcacgccctaaaggagtgggatttccgtctatcgtcgttgtgattctgttcgccactgccgatagccctgctttagcgcgtgccaatgcggaagataacggccgcacattccccattaattgcgtggtgacagtttggggaatctgtcttaatctttgcttcgcccaattgatggcccgagttaaagggtctgaatccgcatctaaatcaactcgcgtgcgttgatgtcgatgaacaaagttatctatttgttgcgccgcctgccgtactcttgcctgaaagctggcaatctcggcgtcaacctcgactgtgtgatgatcagccatccggcgcattatatcgttgacacgatccatactgcgattaaattttcttgtctgtgcttcaactattgctgtcagtctttcgatcattccctcaccccattccttgtccgaattttgcaaagtggttgcggattgcatcattaaaccgctgaacccctttggctcgtttgccgagctcgtttacatctgacttgcgccatttgtcgttatcgccagtgatattgcgctccaattgacgtctggccttatccgcatcatacatcttcttttctttggggcgcttctcattcatggcataacggtgaaacatggcgttttttgccataagctccaattcatctatttttcgcaatttggcccctttgagcagaagcttgtattcattaggagtccatgacatgattaaatccacatcataaaccccgagccaatgtgcggagttcgtaattatttggtcatagtcgatcccgttctctctttgtatgcctctttcatcatcttcaagacttccttgccgttctcttcgtcctccagccgtttcgcttccatttccggtgtttcgttcggagccggtttcttccctttgttcatcttctccatcatcttccaacgctgacggattacgcctttgaaaaaacccgccgagtccagcgttgtgaatgcttcattgatcatcttgtcaattgcgtcgcctgtttcgtcttcatcaatgattttaataattgcttcttcaatagcctcagttgatggcttttctttcttcaagtaagcgagtgcacaatcccaaaaagcagaaagataggaagcctcttcgttgagcaagctcatgtaaatattcattgtgccgcctttgcccttttcgtcagcagtggaatatttttcgtttgccaatctgtcaaaagcaaagtcgcagcgtgatttgtattctttatctccgatagttaagtaagccatttataaaacctccgattattgttgtatgttaaaaaaagagcccgggaagcccggaccctataattccttttctgttcgtatcgtaaaattggccgatcgttccgattccccggccgagttcactgccgacacgttaaaaatgtaggcggtatccggcttcaggttaggattcgacgtgtacgaattctttgagacagtcgctatttttgcataaaatctgtaaatgttgtaagatgtcgcccctttcaccgcatcccatgaaaaactcacctgatttgaagtggcgcttttcgcagttatattgcggggtacgttagggcgtaaccgcttgtgtttgcgtaacaatctcggtcattgaggactcgcccgcatcgttcacagcagagacgttgaccgtcagtttcgtgtcggccgcaattcctgtcaaggtgtgggatgtgcctgtgacagttgcgtccagctgcttgctcgctcccctatataccttatatgaagttgccccatctaccgcatcccatttcacggtcacgctgtgagccgtagccgtgaacgatagattttggggcgccttagggcgtagttgtttttttggcattctcgccaaactgcatgaactctttggcacccgcagaagatctgatctcgtcaattaattcttgaggcagaggatcaagttcacctttacgggtcttaccgagaacaggcaatgttgttgaaacctcaataaacccatcttgcggtgcacttttctctaagttctcgatgattgcatgtccatattcagaatcatgcttatcgtttttgtttttattcaggtttactttccatacctgaactgtctcttcgttgtcataagcatcttcaatcgccgtttgacccggatcagagacagcagcataatatgtcagttcgatgctctcagatttagggccgtacccaacaattcggccagactttgttgattcatcttttgtatcttgttctttcgtatgactgccttctgtttggaatgcgataaacagaccttcagttgaagtagcattcatcggttgaacaaagtaaacctcatcaataccattcaataaatctgccattttgttcatcctttcaattgtttattgtgaagcgcattctgagaatgccgtgacgcgtgtacccgtcaatatcggtgatcacctgcatgctgcgcatctcagaacggcataaagaaaagccctctactgttaggggcctgcttgttaacgcttgaagcatgagactcagaatctccatcgcttctttttttccgttgtaacctgaccagcagtgtaaaaccacattgatttcttcaccgctggatgtcttggttttaaatggggatacatcatcatcgcccattgtcacataaggtttttgctgatctttcgggactgcatcaaagacgcccgtgacgcgcccgttcagctcttcgtctgttgataacctcttaaatagagcagcctgcaacggccacagggcagatcgcatgatgacagctcctttctatcacatttgactggcaaaataccgcatgccttcgtccaccgctggattccagaacggctgtgcccgcattccccgcgtgaccacccatctattaagcttggtgtcataataaacccacggcgtttgccggccgccgccttcctctgcgtaaatccctgttccgtattccacatatacggcataatcggcaccaacagaaataacggcccgtaagccgccctcttggtagtcgatttcaattgaatttttcaggttccccccgtctattgcggcggtcggagcattcagaacagcatggctgtaaatcagctcggccgtgtctgtgaccagttgtttaatatcgtctatgacccggtttctgaactcgctcgtggctctttgcatctgcctgacccatctgccgcttacctcagccattgcccttcagcacccccgtaacctgacatttcaaattcataatctcatgcatgccgccctggtcgatcggatctgatttgagagtcagcaccttgttttcgtagatgatccgcattgtcttctcaatatcattgcgatacgggaaatacacattgcaatcaaccggattctgaagctgctgagcctgataatattcccgggacgtaatccccccgacaaaggcctctgttgtgagataatcggtgaatttttcaacatagcccccgccgccgtccggcaccttttccaaccgctgaaacgttatgacgtgcgggaattcctcatatatcatttaactctcagccttcgatatggcgtaaggtgttttgtgatgtaccgaggaaattctgtattgtacgaataggacacatcccccatgcttcttcccgagagtccagaaggattcatgttatattccgcagccttcgcaacaaaaagcttcacgccagctggtaaagcctccggatcgaaagtgttgctacaaaaatcactggcagactcaatcaaaatagggactatttcagacaaatattcgtcatgcctatctgtcttaatctctgtcattcgctttacttgtgcgatgtccactgaatcacctactcttcacctaagacaatcttgatcagttcgtctttaggcgctttagggtcaaaatcatattcattctctttcaagaaagcaataatctcatctttgtttaccttctgcagttgagcctcagtcatatcaagaagatcggcagctggcttctcggcctcttccactctcttaaaaccaatgtgagaataaaccacctcaaaagccttttcagtgcattcaatagttttggaaccgttagatgctttcatatcacgcgccgcctccttccagtgcttttatccgattctctaaatcagaaagctttgctgtcacatcgtcaccgagtttggctaaagtaactgcctttgcaccgatgttggcattttgtacactaccagtgccgatgttacgattttggacagaaccatcaccgatattgatgtttttcacttctccgtcgccgatcatttccgaagtgatagttttaggagcaggcgcagaccccgataacccggtcaccttcgcaccctcttttatttcgagctcgccgccgatcaccaatttgtcgccgttattagtgctatagtttttagatgtgtaccccataagcttacgcctccgttgctggtgtaatagcagcaaaagcatcatcggtcagtgtcatgaatccgacttgctgagttacacggagagcaaccatatctctctcatacaagttgatcgggtttccgtctgcatcgacaatcgttgtcaatgttgcatcctctgagattttgtattccatgccttgagggattccgtaacgtgtgtaattccagtcagccgcaagtaaagccgctttttcgtaatcccatgacttagaatccgcatatccaatcggaaggccaagagcctgctgtgtggcgccgcctgtcgcatcgttgaagatcggaagaccattaccatcctttgtgccgcggagcttttgacggaatcggcgtgttgttgtaaagccgtttacatctttgtctgcgtcttcaacaagagccatgaccccatttaactcatcatatagattgccaagtgagtttaacgcaattgtgttaccagattccttgattttttcaaatacagatacgccttttgcaaacggtgaatctacaccgaataacgcagcctgatcaaatttgatcgcaaaggcttcagcgatagcagggcgcatttgtgtgaagaaatctgttacagagtagcgcaagaattctttagaaacagggatgatgacacccaatttctttgaaatcatttttgctgttaaccattgagccttagaagtttggattctctcaccttctccaacccagtaagctcccggtcctgaagccaagtacgtgaattccttcaccggcttactcatttcttcatattttgctagtttcgtgacagcagattgggtcataaactcttttaaaaccagcgttccttgttcagttggaaccttcccgtttactgagtcttgcattaatgcattgttcggattaaatgttggcattaaagatagccctccttattttctaatacttgcttcagctgcaagcgagctgatgtctaaatcttgatttgtcggttcattgctgccggactggacatcacggccattctcttgaaacttggattcaatagccttttgaagtgcggcattgtacttctcttcgaatgctccgaggttcttcatcgttgattcttcatcctcaccgataaagaattccactacatctgctggcagttgcttttcagaagcataagaaacagctttgtttaaaagcttttcacgttgtgccgctgtcttttgatcttccagctccttttcgagcttcctgatccgcttctgctcttctgtttcttctggataaagctcttttacctttgcatcaaccagagcatcgaggttgttcgccttccacgtatcaagaccttttgtaaagtgagaatccaaccgaggctgaatgagacgttttccttcttctgtatctaagaacccattcaccttgtcagctgacacggcagaaagttcattcagatacgacttaacatcttcgttttctttattttcttcgagaaattttttcacatcttctaaagttggcattacatttcttcctccttcgccctctacagtgcgcgcctgttatgagtgcatgaaaaataagccttttaacgtcatgctcaggacaaaataaaaaacgctgctcggcgactgttatttttcacatgcaaaaagtgatcgtttcagttcacaataaatttcgtcatatccttttttatcttcaaactgggcagcgacgacctgcatttctattaatcgcttgattcgttcgttctcatcatcactcaaataaaaattatctttcactttttgactccccttttttctcaatggatttgtaccactcttcataggtttgatatgggattgtctggccagccccgctaccgccttccctcgcccttctcgtatcaggcaggacgccgttcactttaaacgcaattgtacaacggcagttaatatcatctttggcattattcatgtgccccggagccggcccgactccaccgtaaattgatttgaacagcccattgcgttctattgtcttcccgtccagcttcctgtggccagatcgtgttttaagatccagggtagcgttccacatttttttaagattactccgttcggaggccttctcagcactttccatcctcgccgagacttgtaccctatgagcttctgttctcgccacgtcacgggctttcctgcgggcaaattcggttgctctttcaatgcggcgggtgatctttgaataatcctcccccgcttgtaggccctgcgcgacggaaatttgaatctgccggatataatcgtctctatgccgcctgtatatcgctgacaaagtcaattcagctatgggatttagaatggcctgccggatgacttcggctgtcgggatgctaaaacccaagttaaccacggattccatttcaaatagataagcagaacgcatataattctctaaaaactgcttggctgctaatgcctcaacaatagtcagaatggttttgaaagccttgtgagattcctcggccatcctctccatttccttgttcagacgattgtatttgttggcatcggctaaagtaagctggccgtccttactgtatttcgcatacagccgggcaatttgtgcattgatctcctttaagcgagatgcaaaaacgacatcaattttttgagcatcctcagtgatcatgtcgtccaggtacttatcaatatcattctggttcatcttcatcaccgcccgcgtctgtttccacatccgttaacggcggcatattgagcctgtattcctcttcttcctcttccatcttcttcagctcatactggacatcatcaacaaacgacaacagagacaggcgggtttcttcacttaccattcctttaagctgtcccgtcgtgtttgcttcttccagtacatttgccggaaggtttctcttaaatccaaaccaaacttttttataatcttccgctgccgcttgccttttagtgccccatgcggaaaagatcagtttgtattgataacgcagagcagcagtcattttccgctccatcgtgatgcatttgttttcaagcgacatcaatttatatttcatcgcaacccctgaaacattcccgccaaaagattcatcggagaaattgactgatttcgcaaagcgcagtatattctcttctaacctatcaagatggttttctatgatggcatcgtttatatcctttgtcagatagcttacgtcatctttttcgtcatacaattcaaggactccgctctttttgagctggtcaagcgtctcttcatcagcaccaagcccttttaaaatcagatatgccagccggtattgttcaatctcattcgatgcatcggacaatgtgcggtcatacgcatcaattaacgaaagaaccttttctgcatctccctttaactccttgttatttgctaaaccaaataaggggcagccatcaaaaagatgcaagacctttttatcaaaagtgaaggctgagctgtctttcgtactgaaataatagacatatttctcatcatagaattctgctttggtcttgccgccgtacaccgtgtagtatcgcaaagcgtaagtaggttcatggatgcttccgtcagtaataaaggcgcattcccatggatcaatattttttacacgctcgtttccggagcgatcaacataagcgagacgggcgccgtaaccgcaaatagaagccatcttcccccactcgctgtcttcatcagcaatgttattttccatattaaaatcttcgatcagctgttttacaggtattgcagtgcttgtcgcatcactctcatcaaactcatatgcaatgggatgaccaaacagatagcccacttttgtatcaatgatttcagagtcaaacgagttgttcagccgattgtttactttatgatcaatacgttttaattttcctgtttcaaaatcctcgtattcaatggcttctctggataagatcggaacgccttgaacctcagcctcgtaccgttcataaagctttttcattctgtcatgatctggcttatgttcctgaatgatcttgtcaatcaattcaggcgttatgccggactgctcaatcatgtctataaactgattcatcagctcacccctttccgccttttcggtttattatgcgaatacagagcgtaccggagtgagtccagcacgtcgtcccattccttcacaggatcgccagtcttttgattccaaacatacataaaaatttccttttcgaagcgagcgaccttatctttcacgatgaacaattcatgtcgcttaaacagccgcgccacttcctcgataccggatatgaccgccttatcagcgttcaatgcacgcagtttctccctgcggaaccgctgaacgtgttccggccgcgcagtatcgcagtagaaattgatgttgccgtatcgctctttgatgtccttcgctatcttcacccagtaatcaatttcctcatgttgcttggcatattcttcgagcaaataaaaacacccctggtcatcttgtccgattacaacaatagaacccgggtgctcatatccccagtcaacgcccgcaaaatactttttgaaattgacgcgcctgttttccaattcctcagagctgatatagtgaatatccttattgaaatccttgtatatgactccttcaggcgccacccaataaccgtgtatatcccgatctgtaaacatgccgctcggcgtcgatgccacgatgctctccacatattccggatcgagaaaattgttatcgaacagcgagaaatgaaatgaccggatgttcagccggccgctcttcaatctttgcccgtctttgtcgatataatcggttttgacggtatgcatcgggttttcggggtttgtatccatcatgaccacagcacctttataagagcaccgggaaatgacttcctttacaaatgaatcatgcagggcagtcgcctcattcagaaacgcaccggctgacgtgaatccccgcgcttttttccatgaatttgcgtttgctccgtcaaagcaatatacctgattaccgaatatctcaacggcgcttgacatattgagcttcaattccttcccaagaatctgctctaaatcagtcagaacgttccgcctgatagttcccagattcgcaccgccaatgataaaattcaggcccatattttgatacttactgacgtgagcaagaaacgccaaaaggagcacgaatgtttttcctgccctctttgcaccgctacaaattagaattttgggttgctctttaataaagctgtcccaaacttctttttgctttttattcagttccatcggcgttcaccattttcctcaacattgcggcaatatcattttcttgggtgtttccgtcgccgccgttaacagctttcttcgtcttctcgatattcaagcgcatttgttccaatttgaggcgccgctcatcttgctcatgcgccagctggtcgaactgtttgatcaggctccggagctctcccattgcccgagattgagcgtttaagagagtcgcatgacgatcccaagcgaattgtatttcgaactcttcttcagtggaagttttttcaaaatattcattgccctcttcgtcctcttctggaagataagtgtatttcgcctttttaagctcttttgcaaggtcgtctttatcctgcacaaacataatgcgctgcgcccgaataatagccgcatattgtatctgaatctgatcccatatcatatcagcaggggaacgctcctgaatctcttccatgatttcaagcgtttcttctggcagatactttgagaaaaacccatgcgaaaccgcgtttcgatttctctccggggcgccgccgttgttccccaatgcatttttattaccgggtggggcgcctgccttttttgtgtgcacacttttttcagagggtgcacccttttttcgttcccaaccatgccgctgcttccacgatttaatggtgttcattgacaccccgtatttttcggcaaggtccttgtatttcatgcctttggcgtaatccttatacgcctgaatgtgcttttcagccatctacatccaccgccgcctccttttgaattgagttgttttggagattattttttaggactaaactcgtcatcgtgtgcaagctgatgaatagtgtctttccctatttccacaagtccaacagcctgcaaatatgattctgcgtcgtatacagtcatcgtggtgccgtctttcatgttgaaagtagcgacatagccatctatctcatgaaagttctgttccatccagttaatgagtccgtttgtagggccgggaaagactcttttcactttactcatcgaatcatctccttcatattctctctaaaccaagcccacactcagaggctgtcagccgccaattgtttttctgagatttaccggaatcggtttacaaagaacataaaaaagcgaccctgttgattcacagtgccgcagttaaaattttaaacctgagcatgcttaacgctaagtcttatattgtattcgaaaacgtcaccgtatttttctttatcaatagccggtatcatttcgctagtaaactctatgcatcggccctgttcatgaatttttttcaatcgatcaatggtgaaccctaaatcattatgagccttggagaattgttcaaccttttcagtagtgatacagtcgaataactccttatcagcgactgccccggataccagttgatttatttgatttatgtttaattggggtatttttgcattgtgcaaatgaccagtaatcctcacgttctctaaatcagtttcttgtttcgatgtttcagaattcatcttactcactcctttcgttagtgaattgcgaacaaaagcgctcttcataaataggtggcaaccgtaagacgaaaaaacacccttttgacagggtgctcatttccgcctatgtttttggaaatccaaaatatcctctttcagaaaaagcctgtcccggggcatttctttcatcggctccagttccccggtcttcactaactggttcagatactgacgggtgaaccccaatatctcaagcgcttcacttgtattgagtatctcttcattcaagaatttcttgattgcgtcacgctctttaggcttgtacatttttgaatcatccttttttctcgcgatatttcaagtaaagggaaaatgctttctcgatgatcgaaacaacaaataaaatgatcaggctaatgtcgagagccgttttcaatggtcccgctgccacatcctgacggaaaaacagcatatacgccagggcgagaagaacaacaatatcggtggtggactgtacacttttcatttttttgaaagtggctggctttcaagtatttttctttagtcgccgcatttgctatacttggagcaagggagaagcgctaccttctccctcggctcaaaatcatctgcgctttcttggacgtctgcgttttttgattttgggcttttttgttttaagcttttccctgatgatgaggactttctcaacaactgtgagagttgtgaggataatccccagtaccaatgcgatttcagccactttctttccctcctttctatactttaattatacctcgtttatttactcacgtcaagtaatttaatggacttttttcattatatctccaataaaaaagagcctattcacgctaaacagaataggctgtgatctgctctatttttcattttcaggcgggaacgttcgatgttcttctgcacggttccttttttaatccccaatatctgcgctatctcttcgaatgacatgttttgcacagcgtgcatcatgaaaatgtctttttctctttcggtaagcacggatagggcatcagcgattctttccttatcccaatcacttacctctccctcagcctcttgaacgattgcgtattcttccggcagcgcatcaattaagcgcggatcagcaagaatcgtcctttgatatgcgtctcttctgtcagcacctcggcgagcgcccggctgtcttccgttctgcagccattcaagagtgaattcaatgtcactgatcatactactgataatctttttgtcgttgatctgttcagccgtcagattgacttcagctgtatctttgtagagccgatacatttttcttgtttctcttaaagctcgtttgtactcaatgattaaatcttgcattctgattcctccccttatttgcgcttaaatgcgccgcccttgcctcgtttaagtctttgcatgtcttgtcccatcatttgctgccaaaagcgttcagatcgctcctgcgtgtttttattgggctttttctttttctgcttcatgtcatccctccgctcaaataaaaaacggacaccaatcagagcacagtgattctgtgcaatgatcagtgtccgcaggctttccgtcttggacttattcagttagattcgttcttattcttctctatatacttatcaatatcttgaaaaaacgccgcggccgtgaatgcgagaattgcgcctattaacgtgatgtttgctttcatgtccggcctgtattcgtactgaaaataaaaccagaatcctaaccccatcagcagaaaaactattctcagcgccatcgaatcccccttatttgatttggaattttgctgattcaaatgttccgatatagttccgtttgccggaatcagagtagcagtccagctggatgacataggttccctttccggtcttattccggatcgttttcacgttgaatgatttcagaggcgttgccgttttgaagctgccccgctgtaccagattcgtatcagtcaacccgccaccgctgcgcttcttgtatacgccagccgtgtaataaagagttcttgagccttttttctcggctttccagtccaccgttgaggcgccggccgtgtatgtcgcggcatccgtaaacacccgtccgctgtacccggattcattttgccagccggaccatgcggcggaagcagacggcgcaacggccgcggctcccgtaagtaatactgctgatagaatgattgatttgaatagttttttcattatttcatttcctccactccgagaatctctttcatgtattcgactgtcttaccgatctcaaaccaactgccgtctgccaattcgagccgggaaccgccgggaatttcattgatggctgctatatcctttttatcaaatgcgcacaggattttatcccctcgccagatttttatttctttgttcttattcctgtttgcgatagattcatgaacggatttcataaagcagtcagagcaagtgcctccaccaaactgttcaagccgctttccacattcacaatgcattaagtcattttcggctcctgtcattccgtcacccccaaaaatgatttgcagcactcgcgatgccatacacgacccaagagagggcgaaaaacaggattcgccagttctgcccccggatcattttgttttgctcctgaatcgtccgcgctaaatcttcgttacgcgtttccagttcgatgcaccttgcttgcagttcttcgttttctgtcattgttccatgccatccttcacgttataccccttcaaaatcgccttatttagatcatatgcagacatgctgttcagcggatcaaacaatccggtccacggttcgacatcacctattttaatgacaaagtgtttcccgacaaattgaaggcgcgcaaattcttttttatctcctttagtcaacgcgttaactctttcgggttcatcgtcagccatttttaaataaaacttcataccttccttaatcgcccgcgcctgttcctgtgtgacctcaaccttatcgcttgttttgattgtgatttttgtctttgtcattccgcgccctcctattcctatgatcttagttttgtcttatttatcatgattgtcatgcaccgcagtatgaaaaagggaagtctgatctagcccggtgcgataaagaaatccagcgtagcgttttgtcttaaatccgactttctgaagcaaccaacaaggaaaagaaatagttgacgatagcccaatcaataaaattaacaaaatgcctgttttcgaatctagtttgaatccccacataaaataaatccttcccttcatccttatctcccatcactccgcgccctccttcatcgtctcttccagtaaacttaaatcatcagaatctatcgcaagagtttgttctccacaaaaagggcaataaatttcggacgtgctggcaggcctttctaagaatgtccattcctcgcagtcgtcgcaatggtatccgatcaatgttccattcacttttggcattccgtgtccaccttcttccgccgcatcgaattcacaagtatttgaatctctttcgtgagccgctcggcctcttttgcgccttgatctatcacattgagtctgtttcgctttctgtaaatcaccgcgtcatgcatgacgttgttaacctgttcgctcaattcatcaaacagattgaaaagttgaatggatttatctttgtatgccatcactccgcgccctcctttttaagattaaaacctaataaaaatgccgtggagtaaatcgtttgagctgaattaaggttcatatagtaatcgcccatatcttctattgattcggaagcaggccgtttatttttcaaatcgttatatgtcgcttgtagtatctcttcttttctgtctaaattctgaatagccgcttccagatagactgcctggtcaagagtttcttcaagtgcgtgctgcaaccagccgcgtatgtcatagacgttaacttggacggggcggccgtacttggcaagccccttttcctgttgtgcgtttagtttgctgatgacggctgaaatgatcgggttgtcagcgtggttcatcaatacccctcctgctgccgctgatgattgatggcgtttttgtccatgtaagccgcttcgatttgctcccatttaaaaccgagcttgctgcctaattcaaagaaagtcgtaaataaactgatatatgtccgcttttctacattgctgaaatggaatccgtaagcaatggatagcaagcaagagaatgtttttgctgtaccaaaccctttttcagaaattaaatgctgcgcgactacatcatctatggtgtcagtgtcattccagcctagccggttcccgatgctcaagataaaatgcaggcagtccacgtattcctcaagtagtgggtttttatcacgaaaagccgttacatcacccacgttacaaacaggacatatttcataatccggatctattaagtgtttaaaatcatctttgtttaaattttctccgcaatagtgattttcacatcggaaaaaggctgcgttttcaggattcgcaccaacatttgttgatacttttgttcttggcttttggttattactccaatgcttaaagccgcgccattcattcgcacactcggcaagttccacctgtagagcaagaatgaggtttggcagcaggtcctgcccctcaagccccttttctttgatgatccgatcatcaagcgccttttgcatttcaaacattttttgtagattcatgattcaactttctcccttctccgtttacgcggaatgcctatttttcttgcatgatagaaataagtatcaatacattcgaaaccgaaatgctgtgctatttggaagtgggcccaattctggttacgaagctccgtccattcttccagagtgaacaggcgatacggtttctggattactatcccgttagcctttttccagacagaaagagtggatggagagcaatgcagttcctctctcgctatttccgtgtcagacataccgcgttcatgaagctctcgatattgctcctctgtgaagccgatgtcatcaagtaaagtcacactatttcctcctcagcacccatgcagcgcccacaatgcgggcagcgtgcatccgggcggatttctaaatcaagttttttataatcgcagtccgggcaatggtattcgatcaccccgtcaccccatcaatcccggcagtatggagacagcgaagaagaaaagccccacgcatgccccgaccagccagatatttgttttatcccgtttagcgataatggtatcgccgatcattttcagatcgtcagaccgagcgacaagcgtcgggatgtagtccgggtgaacctttaaaagctcggccgcctgctcgacggtcattgcttcgtccttcgtggccttcacgttccgttgcagttctacttgtaatggcatcatttttcttccccctcgcaatggcattcactttcttcatgaccgcattcttcgcatattttttcaacctgccaaccctcaaagtgatatttgggcattgaataatattctttataacaactcgtgcatgttacgatcccgtcgctgtctgaatcccagttagaatggtatgcttcttctgtgcaatcgcaatacggacaagtttgttcttgggataattcgctcattccgcatcacctgcaatctgcagatttttataatgagctatatgtccgcagggattttcccaagtatgaacttggccgaaaaatccgtcctcagcgtgctgcgtgagctgaggatttcccatttccccgccacaagtagggcattcccaaagtgcattaacttccttgaacccgatcaggaaaccattggtatcgcgggcgggaatcgttacttttcttgtcttcattccgcagccccctccaatgcttttctggccgtttgccctccgtcgagttcgacagctggtggacagtcttcaaattcgtttgtatacgtcgtttcattagcgtaaaattctaatgcgtttctataacgcttgttctccgcctgcagcaacttaatatcttcctgagcctgccgaaactgattgaccgttacttcctgctggcgttggtgttcctcaatgattgcctgctgttttctcatgtagccgatcattatgtctttgacataactctgctcgatgatatagcaaggtcctgcatttatatcgagtggcttcaattcctcttttgaagctaagtgccacaatgacaagtcgcttataatttcctgtaatttatccatgcccgttcctcccccgcaggggaaacccctgctatttgaatttgtggccgatctcgtaatcacaacgagccaggccgccttttattgtttgaatgattgttttaccgtgttccggggcatccattaagtgggctgtcccttcagtaccatctaaaacgatgatccggactttccccggctcgatgctttgctgaatagttgtttcgtgattttttatttctgttggcttgttcactctggccgccccctgtgctatgatagaagtaccagttcatatcagagcatcggggccacggcttcggtgcttttttacgttttacgacggcagccgcatcgttacgccagcagatggttttaattcctcgcggtaaatgatcggatgcttttcgacgtatgctgccaactgctccggcgtcattttccactctttaactggaccaggcttgtatggattgattttttcttgcatagcgataacctcctgaattaattttgggtatttctgaacctccaagctttttacaatccgctcccatgcggctggcgcatcgtttgcaatcggaacagagcgtcatgcaggccataagcttatcttcttcctgcacccacaacggccgatcgtctgcgattaccacgttttgcagtggttttccccgcctttcttttgagttttttcagctcgtccagctcaatgaagccgagtgccttatccagcgccagcaccttgagtggcgtctcgtaaagacgctcgtacaacttacgtttgatggcaaattccgttgtttccacgcccttgatgtcaatgatctcgatgctaccgtccaagttatgaacctcaaagtctgcaatatattcaatcttccgaaaagttttgccgttctttttgaatgcctcttgaagcaggaaccgcggctgcagcttaaaatctttgatctgcttgctcatcttgagccatttcagctgttcatagtatttggcttcagcccggctatcgaacgtgatgccgtccacctgtgtttttctggcgccgtacttatttgctggcatgtgatgcctcctgaacagccgcggtgattgtttgttttgtttggataatcaacgcttttaattcttcgaagttgttcgcctgccccgtcaagatttccatgtttagaattcgattacacgcagactctaaatctttgaaatacccaacaggcttgtacccgacctcgccagacggattgccctctttatcctgcttttgaaatttgatgttcaagataacgttcattggatcagatgtaattctgtatttaccgatgtctaaattcattccgccgctcccctctctttcaatgtgcatgcctctaactcttgaccgttgtattttaaaaactgtgttatgactcttttttcttcttccgatagcgcactataaaataatagggctgctaatttgaaattaattggcggatagatttcacctgtataagggatttggtttagttctctcattctgccgcctccatatctctgactatttccttatcggcccgttcccgcgtgccgtcgttacctcccgtcaatttgttcccagtgctgaatctgcttttccttgtacggcgccgtgaggatgatggccggcagcaggatcaccgctttaagcactgtgcatcagctccatttgtttgattttttcctcaagcacccggatagccggggtaaggtcctggccggccgtttgctcggcgggcccgaacagatacataccgccggttgctgtgaagttcgctttttccgtcattcccaatctcctaacctatgatttaattgcatccggtcgcccttaatgatcaccgtataatctctgcacatttgatgaatccgggagcccagcgcctcgtcaatatccaaaagttcacccgtgtcgagttcggaagagattagcagaggcttgtgattcaagtaccggtaattcacaaccgattgaatttgctcaatctgccattcggtagcacgaggctttttgattcgcccctccatggtcgttgcaaaaactggcttgaataaatcatcaatgaacagaacctcagcttttcgcatggcatcgagctttgtttccagttgatcaaagtcacttcgcagatcgcccattccctcaacgtacgggaaatacatgcagtaaattgattttttcttgatcagattgttcatgatcgccgttaacaggtgcgttttaccgctccccggttgcccgagcaaagcgatactgtttgaacgttttcccttgatgctctgaaaatccttatagtattccaccgcgcactcataagcgtccttgatcatatccggcttcccgtccttaatgaagtttccaaaaaggagcttttcgaattcttccgtgatgccgctggccttcataagccgggcgatctttttccgttttacacactcgcattgctttgaaaatgtggttttccattcccgggccttatccggcaagcatactttccccgcaagataatcctcttctctgaccatttgatcaggggccaggctttccattgtcttatgctcttttctcaattggcgctctgtgtcttggtgaatccggtaaacgataatgcccttatccttgcagtcagaacactcatattcagccttttcttctgaggcggcctgtcccgctgaagatgctgctgaccgatcccgaagcttggttagaattgccttcattgccgcgtccatatcttgcgttttgcgagcttccatactgctgtttctcctttcgtctctggctgaatgggtttgagaggattgcttcaatgtaattcagattgacgttgtttcccttgcttctgaaagcctgtttcattgcctccatgactttctcttcgccgtaatcatccaccatatatccgagccgctgaacctccatcgtgccaattgtgcgggctgttttgttttcgaatagttcaaatgcgtttttcattttttcgtcaacctcctgctgtgttcttggcgatgattcttctttcggcaatactacgtctggcgtatccgctttaccgttctccgtttcctcattacgtactggattttcaaaagagattagcttgtatttcccggcctttctcccctgcggctcatattctatccgtttgagctcgatcagaattttccggtgctttatcaacgtgttttctgttatctcgatttttgcttgaagagtggtatttgaagtggtgaaccactcccgccacccggttttattgttgatgtgcatcagatggaaccataacgcttgtgttgttgcagacaacggattcgtttctaaccaattcatgaagccgttcatttctttcaggtagttcatggctcacctacttcctttcacacagtgctgtcatgccgctgatgcggactaaacgtaagccaggttcatttgttcttaggtagccttcgacataatcacggaacagttgggcacgatttggggccccttccgtcatccacttgtaacagaaagggatgccaaccttaatcaaatggcaggtcattttcactaatgtcaacaggcttaccgtcaaaaggatcagcattctgcgcgcttggcttttcttccgacgcttcggcatcaatgatttctgcatctgccatttcgtcagtaatgtcgatccgttcacgttcctcgtcatcctcaatgactgccttctgcatttccacagaaagtatgccccacttgctcaaaatagctttcaaaactgttttcagtgccatagcatcccaatcgtttttccatccaaaatctgatttactgaatttctttttatgcttctcgacctgagcttttgtccagtagacagtttttcgaaaaccgtttagcagttcaaagtatgcagcgtaccctatcacgtcctcagacgtacgttgttcaaaatcaatttcaatttcttccgtcagtgggttccatttctgaagctccccttcatgaatagcaatgcagttgatagatttgtattggcctgttcgcaatgccagctgaatataccctttgtatccgagctggaactgtgctttgccgccatacggaactatccacgcataacccaagtttttatcaaccggaagatcaagcgtagccgccaccatcgccgatgaaattacgctcataggctctgccttttggagcattttttcgccgttgtaaaggctcagaattgatgctgtgaactgtggcgcccttttacctaaaacctcctcaaaccggcccatgaccgctggagaagaaagcagtccctttatcgttgttccttgctgttgtgctggagaactgttttgtttcttctgaatgctgtttttaagcgattgatttgtagccatgtttagctaacctccttaattccgaagcgtctgtactgcacttcttttgtgactttctcatatacatctggaaactgctcttttagtatcttgctgtcgatccggttcgttgaaactgacttccagcttgtttgataatttccgatgaagccatattctgcttccttcatttcatgtttgatctggttttctaattcctttgcctgcaatgtaagctcgttgatctgttctttaagctgcaaatactgctgaatgcgtgttttattagcagatgtgagatcaacaaccttaccgccctcagcctcggaataacgttgcttgagatattcttctgcagcactcgaaccgtcaagagctggcgcctttccgcccaagaccttttcattccagaattcaacctccgcttgaaagatcatcgcaatgagctcgtcatcgcgctcaatctctttccaaacgaatttattaccgccgataagcacagcgaaatatgcttttttatactcgggaccaagaacaccaagataatgctgaacctgaacaatatagctgtcaggaatctcgttatcttcccattctttcaggttatatgctgacgtggttttgcactccaatatggctttttcgcctacaatcattcggtcaacattcgctaaaatgaagtcatattcaggatgtttgagcatggactttttacgcctaacctttttcccgctccgcacctcaaattcttttgcaacaatatcttcaagaagagaaccgaagtatgcagcttcactgcctgattcgctcacaggcacctgtccagttttgtctaaccataattcaaacggcgtttgccatttgtttatgcctaagattacggaagcatctgaaccgccgattcccttccgtcgctcaagaagccattcgtcccgactcatgtccgctgtcgaagcgaaaacctctgcttgcatcagatcagccccacctttcttttgtaagcctccgcgccaagccgctgccattcccggtagtgatccattgaagggaaactaaactgcgctttaccgtttttggcgaatacaattgaaccgcctacctgccttaaacgttgctgatcctcagcgcgctcgctgaatgccactttaactgctcttgtcatcgctgatccccctccgctaaaattctttctccttccctttccaaataagctctgccatcataagtaagtgaaacagctaaaatctgttcttttggaggttcaggcgattttatacctgttaatctttcaaattcataaccttcaaaacactttataaaggctggatcaaactcctgtatttctttaaatctctctttctcttggtgactcatagcaatgtataaatcaatttcattagcatcacgcattaatttgatgtgctcactcgtcaatttcatatccaacaaacctccattgttttttatggggcgttttggtataataggaatacaatcaatttccaaaacgccttacctagtccactctgccaagtgggcttttttattgtgctgaatgaaacctaaaccccagttgctccttcaaatagcgtttaagattgtcttgtaaaatcacctcgccgctgtcgattacataattatctgctgacgttacttcatccccgaaaaagtccttttttgtttccggctcagtcgccttgtcatgccagttgttcagaatcatcgggttttctatgttcaatttcctcagctccttcgtttacctttgccaattcagcaagactctcgattgcattctctaaagagtagaattccttatgcagaatgctcacagctcctttgatctcttcctctgaatatttcgccttttgggcatgtcgcaagaagcttgccgcgagctcaaattttctgagattcatcccatacacctacttatcactgccagattaataccgcgctgttgcatttttattgctgtatgatacaacctccctttattcgcaagtcggctgatgtcctctgtaagaaccttgatgctccctgcaagacttatagcttcttcataatcgccgtcccgtaatgcctccgagagcatgatagagagctcttctgccgactcgatttttctttttgctgaatctgcatctgatttaagaaactgattgattttcataccagcaccgcctgcctttcttctgttttcgccattgcaacctgactcattagcgctttccgcgtccacctttcggccagttccttcatgttcaatccatgactacgggccagcgaatatatcagcgttttatttgccgggatcagatcaaaaatctgtttaatatcggccattggcagttcttcaggttgtcggcctggcctatcgtttgccagccagcgcgctaaatgccttgttgcttgcaatgcttcttcaagctgatggatcatgttaattaccgccgcgcttgcgctctcgttaagagccgggtcaattggcgccgccgtcgtcgggtgcaatttgaagaggtaatgtaccagatcaatatgttcgtatgcctcgcacgcctcaaaccacttaatgcataattccggggtaagcttactgaatccattttcaacgtccgaaacataccgctgatccttcccccctatcaaattaccgatctgatattgtgcaagtcctgccgctttgcggacactacgcatgatccggggtagattatgcaaattgtatgggttgttctccatatgtttgcctcctgatatatccagttgttcactggtaaaatttaattaatgaaggaactagcttgcttgctgttttctcagcttgtcgatgataaaggcctgtccctttggcgtaatgcggatagtcagccatgatttagattgaccgtttacttgtcgcactccctgtgctatctcaaaataaccacggtcgatatattcctggtatggctcgttcttgtttgccaagatcatcttccactcgcgtagcttttggaacagccgtttttctccgatgctgataccctttttagaagcaagcttcgccagttccctcacaagcaatgatttttcagatgccatacaactctctgcaaagttgataagtggctgctgaatctgcagtgtgtgctgaagtcgttgccgctcttcctcttcggtgatccatcgctttgcccggctgatcggatcatcaatcatgtaagagggttgattgagcctttgaagctcattttccatacggttaaattctgcaatgtatttttctttaaatattgcggcctttgcgcctgtgtaaccaaaaaccaaaaatgtgagtccatcacgttttataagatatttttggtatgttcggtttctgtcatcctgataatcaacctccgcaaaattgtggagattaaattcttggctggaatcaaggtttctgatgtctcgcaggaccgtgtcatgccgtttcccaaagacttcagcgacagtcaggctgtccgttacaacttgattgccttcgatgaaaaccaattgactcatgctgtagcccctttcttgtagtagtcagtgttttcggcaacccaatctgtgtttttctcgatccacttgaaaagcaagtgagtcggtattcttaacccggcttctttaaaaacaggaaagtcagcacggttgataagttgagaggccttcgtttctttgattttcataacctccataaactcttgctttgtcagcattggcgggagttgagtggttctgaaatcctgaagagctccagcgacctcttccgctatgatttcgcggaacatgtttctaaaagcttcatggtctaaattgaacatgcttttaacctcctatgctgtgttgaatttgagttcattactcgaaacgcgtagttcctcgtcaaaaaaaagggtccaatggaatccaagaacctgtgcgatagccttagccgttgggacaccagcatttctttcgccttgctcaatagatgcgtatgttgttcttgcgatgcccgctctatcagcaacttgtttttgggtaagattttgggataatcgtatttgctttaaccaatcccttacaattgcaggcatgtttttcacctccatgactcatttcgtgtcgttgagttaaatatactacgcaaaacgagtcttgtaaacccctttttttaaaaaaatgactcttttcgagtaatctatacatactacgcttattgtgtagttataatgtaggtagttctaaaaacgtgatgaggcgatactatgaatttttcatttagacttaaagagctccgagtagggagaaaattaaatcagcaagaggttgcagataatttaggcattgcccgcacaacatacgcatcatacgaacagggcaaaagagagccggaccatgagacgcttgttaaaattgcggatttctttgatgtttctatagattttttgctcagaggcgaagatcattatagagataaggccagagaactccgtaaacataatgacgttcgttttgccgctgtcgatggtcgggaattcactgatagtgaaaaagaggaaattctcgcagatgctttaagacgaattgatggcattgaaaaactcattgaggagaatttcaaaaagaagaacgaagataagaattaattatttatttattattgttttgtttagtttaaataatgctgaatagatcacctcaaaaattgaggttaagtgttcagttgaatggcgttcaacctcaaaaattgaggcgaacacttcagcaataccttcagtcatttccctttcaaccgcaattattgaggcaatactttcagccttttttatgttttcctatgaaaatactagaagaaatggtaaaactctcttgaattattaatcgttttagttgatcatatataggtattctattatatgaactgggggaattagtttgaaaaagtggttagttttattcatgtctttgggcttggctcttgcattagcagcgtgtggatcgtctgaaaacgcctcctctgacaacaacggggaaagcaaaaatgagaaagccgaaaagaaatcctctgataaagaggttaaaatgggccaagatattaaggttggcgatatgatttataatatcaagtccagaaaagcagctgatcaagtaggcccgtctgtactgccggagaaagcaaatgacaaatacctggtcattgaagcaacgcttaaaaatactggtaacgataaaatcactgtggatgcctctttcttcaaattgaaaaaaggcaaaaaaacatatgaagccgattccgcggcgagtgtttcagcgaaccaaaaagaagacggcagcatcgacaacagttttctcatgcaggatttaaaccctgattctacaatgagtggtaaagttgtttttgatgtggcgccggaggttgcgaatgcaaaagacctaaagcttgttgtccaaactggcatttacggcacacaaaaaggtacaatatcactaaagtaagccttcgggcttcctttttttgaatacaaaacagaacaaacgttctttataatgccactataacctatttatggacgcatttaccggtgtaaaatggtacatttttcccctataattacatacaagtaaacagattttccacaatttaagcattgacaaggtaatgagggggtcaattacaacatggggtatacgcaaagtcacttagaggattggatcgaaagttttctcagggaacacaaaataacaacgccttcagaacttaaacttgttaaattatgcaggaagctcaatgtatttgtactttttgatgatcgagaaagttatatgttagatattgcgggggttcatatcgtaggcataaataaccggttaagctatcaacagcaacgatcggatttagctcacgagttatggcacatcttattagagggcggcgataacgagcttatgccgccacactggagacagtatcaagaatcaaaagcaggttatttttcatatcacttttgtgttccaacattcatgctgcggcaactgaacttaccttcagatgaggaagccgctgcacggttggtatcggatacattcaaggtgacttttgattttgcaaaaaagagattaagaatttactttaataaattaaactatcgttaaggaggattaaaatggttgtctttaaaaaggagaaatcaaagcgttcatccaaggggtatacttggtatttcgtaatggaaaacggccgcgatccaagaacaggaaaacgcagacaaataaaaagacgtggtttccaatcaaaagcatcggcagaagccgcttatcttgaattgaaaacgaagctcatttcagggattgatgtcgggaaagagaacattctttttcaggaaatcaaagacctatggtacaaggaatacaagcataccgtcaaagtcagtaccctgcgagcacgaaaaagtgaaatagagagtttggaagaatacttcggaaagatgaaaattaaagatataaccaggggtgtttatcagaagtttttagattatctgagggaggaaaattattccttcaacacaataagtggtatccacactacagcaagtatgatcttcaaatatgcgagacaggaggatatcataagcaaaagcccgacggaatttgttaaaccgcagcgtccaaagcttacagtagaagatattgaatctcaagaagaagtcgaaaactttcttgaaggagaagaacttgttgagtttttagaccttacagaaaaacacggcctttttctcgactttgaatatttctgtatggctgcatttacaggcactcgttccggtgagcgattggccggcaaatggagagacttaactttagagggagacgacctcaaaacatttcgagttaccaaaacgctttattgcccatcaaacaaagcatctgactatgaactgttgccaccgaaaacgccagctgctgttagagatgtacctttgtcggactttttagcatctttgttgaaaagactgaagctcaaacaagctaaaatagcatatgcgaacgggcgaacattcagtgacgatgatttcatattcgctcgtcctgacggccaccctgagaatattaaaaagatggataccagaatgagaaggattttaaaacggatgaacctaaacaaacatattacccagcatacttttaggcacacattcacttcgcttgctgctgaagcagatgtacctttagaagagatacaaaaaatattaggccatcaaaatgatgacataacgaaaaaagtctatttacacactactagaaaaaccaaagaaagaacttcgcaaaaattcaattcattcataggtgacctctcaatgaaaatacagttatcatgactcctatgtgaccaaaatgtgaccaatttcataaaacaaaaagaaaaaccccttgaaatcaaggggtttcggcactctttacatcatgccacccataccgcccatgccgcccatgtcaggcattcctgcgccgccggcgttttcttccggtttgtcagcgacaacggcttcagttgtcaggagcattgctgctacagaagctgcgttttgcagagcagaacgcgtcacttttgtcgggtcaacgatacctttttcgatcatgtttacccattcgccagttgcagcgttgaaacctacgccgattttttcgtttttcaggcgctcaacgatgacagatccttcaagaccagcattgtgcgcgatttgacggatcggctcttcaagcgcgcgaagcacgatgttgatacctgtttgcgcatcgccttcagcttccactgcagcgactttgttgtatacgttgactagcgctgtaccgccgccggacacgatgccttcttcaacagctgcgcgagttgagttgagggcgtcttcgatgcgaagtttacgctctttcagctcagtttcagtcgcagcgccgactttgatgacagctacgccgccggcaagtttcgcaagacgctcttgtaatttttctctgtcgaattcagaagttgtttcttccacttgagcgcggatttggttgacgcgtgcagcgattttttcagtgtcgccggcgccttctacgattgttgtgttttctttcgttaccacaactttagaagcgcgtcccaattgtccgatttcagtagatttcaggtcaaggcctaagtcttctgtgattacttctccgcctgtaagaacagagatgtcttcaagcattgctttacggcggtcaccgaagccaggagctttaacggcaacagcgttgaatgtgccgcgaagtttgttgacaacgagtgtagcaagagcttcaccttcaacatcttcagcgatcagaagcaatggtttgccttgctgtacaacttgctcaagcacaggaaggatttcttgaatgtttgtgatttttttgtctgtgattaagatgtaaggattgtcaagaaccgcttccatcttatcagagtcagtcaccatgtaaggagacgcatatccgcggtcgaattgcataccttcaacaacttcaagctcagttgtgaatcctttagactcttcgattgtgatgaccccgtcgtttcctacgcgctccattgcttcagcgataaggcttccgacttcctcatcagcagcagagatcgcagcaacctgagcgatagactctttgccttcgatcggcttagaaatttcttttaagttttcgattgctacagtcacggcttgttccatacctttacgcacgccgacagggttagcccccgcagttacgtttttcaagccttcgcggatcatagcctgcgcaagtacagtcgcagtcgtcgtaccgtcaccggcaacgtcgtttgttttgctggctacttcagctacaagcttcgcacccatgttttcaaacgcatcttcaagttcaatttcttttgcgattgtcacaccgtcatttgtaattaacggagaaccgaattttttctccagaaccacgttgcgtccttttggccctaaagttacttttacagcgtcagcaagcgcatcgacaccgcgaagcatagcgcggcgtgcttcttcactaaacttaatatcttttgccatgttaacgaaacctcctcgaatttttaaaaatatttatttgcttagccgataacagctaaaatgtcgctttcacgtaagattaagtattcagtaccttcgtatttcacttcagtaccggcgtattttgagaagataatgcggtcgccctcttttacttctaaagcaacgcgctctccgctttccaacacgcgacctgaaccggctgccacgattttgccttcttgcggcttttcttttgcagaatccggtaatacgattccgctggcagttttttcttcagattctacgagttcaatgacaacgcgatcacctaatggctttaacaatgtaataacctcctcaatagtatgaatatgtaattttagcactcagctctaaagagtgctaacacagttattataataaagaatctcacttccaatttcaagtcataagaataaaaaattttcacgcttacatgattctctctcacactgattttcttcttttttcacgtcaagttcacttgtgttacaataagaacaaataagttgattttataggataaaggagtacatatcatttgagaaaacagtattggtatatcattttgacatatgttatcatgcagctttccgcattgatcggcattcctttaatgtacaaattcggctatgcgggcgggcaccctacgaatgcgaatctcaccatggctcaggggatttattccgtcgtaagcttttttatctgcctgattatcgttctcttgattttgagaaccgcgccgaagcagacattaagaaacgggaagaaagcatccgccggcatgtccgttctctgggcggtcgcgggaatatggctcgctttattttctcagggaatcgccgggatgattgagcagtatgtctttcatgtgggcagcggttccgaaaacacgaaagccattcttaacattattaaagccatgccgctcatgattatcgtttcttctatcgtcgggccgattcttgaagaaatcattttccggaagatcattttcggtgtattatatgaaaaaacgaatttctttatcgccggactgatcagttccgtcattttcggcattgtgcaccaagacctcacgcacctgctgctgtatacggccatgggctttacctttgcgttcttgtatgtgcagacgaaacggattattgtgccgatattcgcccatgtcatgatgaataccattgtcgtggtcatgcagctcggccccgcccaaaaatatattgaacagcatagtgagcaaatgcaattaattactggaggattgtttgtatgaggaacccaatgacttggggcttgatttatttcgcagtcggctgtatctttacgtatttggccgcaagctctccgggaagcatgtggtctttttattccatactgctgatggttttcgccgcttataatatcagcatctcgtttaaaatgttcgccttctcatttaaagtgaagaaaaatcaaaaataataaaagaaaagccatttctcatcattgagaaatggctttttttatgctgatacgtcctggtcagattcactgccgatctgccttttccgatacgccgcttttgaaatcaggatactgatctcgtataaaatgcaaagcggaatggtaatcatcaagtgagacagcagctcaggcggcgcaatcatcgcggcgatcacgagcagcacaaaatatgcgtacttcctgatcttcgataaaaacatcggcgtgataacaccgagtctcgttaaaaacatgatcagcaccggcatctgaaacagcagcccgaacggaatcgtcagctgcagcagaaaatgaaagtattcggtgatcccgatcacctggttgacatccaggtcattcgagacccgcttcataaaatcaacgaccagcggaaataaaatataataagaaaacgacacaccgccgacaaacagcacgatcgaaatcggaatatagctgagtgttactttgcgctccttctcatacagacccgggctgacaaacgcccaaatctgatagagaataatcggcgaagtcaaaatgatgccgatgataaacgcgaactgcaaaaagataaacagcggatccgtcaggttaaaagcattaagggtgagctcttttacttcatcggctttttgaagatacacaatgataggttttgccagaaaaaagccggcaataaagaaaaccgtaaaggataacgccacaatcagcaatcgtttccgaagttcggcaatatgctccacaagcgtcatttgattcactctcatacgcgtcatcctatcttactgttcttctttctttttttcctcttcttcaccggctaatcccttagtagcgttcttaaattcacgaagcgtgtcccccgccgcttttcctaattcgggaagcttcttcggaccgaaaataatcaccgccaccacaccgataaccgccaggcttccaggaccgatcatgtgcagctcctcctttcgctattcaatttcttccaaaacagaataatgctttaagaaataaaccaatgattgaagctccacagctaaatctatatgatgaattcgaatgtgatccggcacattcaaacgggccggcgtaaagttaaggattcccttgattccgagcgccacgagccggtcggtgattgactgggcggcaaccgccggaacggtaagaatcgccacgggttcatcctttatgtgaagctctaaatcatcaagatcaaagacaggcacaccgcctacctcagttcctattttactctgatttacatcaaaagccatagatatttttgtgttattattttttgtgaaattatagtgaagaaacgccgtccctaaatttcctacaccgatcaaaatgacgttcgtcgtttcatcctgatccagtgtttttctgaaaaatgacagcaggtaatccacattatagccgtatccttttttaccgagcgccccgaaataggaaaaatcccggcggatcgtggccgaatcgacttttaccgcgtcgctcagttcagctgatgaaacgcgctgctttcctgacgcgtgtaaattctttaaaaagcgataataaagcggcagccgttttgccgtcgcctgtggaatttttgattgatccttgttcatgattggtcctccactttatactcagatgcatctcttttaaaatcaccgtttttgcctcctgttttttccatgaggcaggtcgggccgatgaccattcctttatccagcgccttgcacatgtcatacacggtcaaagcgcagactgaagcggaagttagcgcttccatttccacacctgtactccctttcgtttttacgcttgcctgtatatgaagaacggcttcggaatccttttcctcccagccgaatgaaatgtcgacgctgcttaaagaaagcgggtggcacatcgggataatcgctgacgtctgctttgcggccataattcctgccacctgtgcgacagccagcacgtctccttttccgatctcgcggtttttgattctgctgtacacgtcatgcttcatgtgtacgctggatatcgcagcggcagtacggactgttgaagatttatcgcttatatccaccatgcgggcacggccttcttcattaaaatgagaaaatccattcatatttaaactctccttacttctgatcatacactattttctccctgatgtcttatcctataatgttccaattctgatgtattgtttgctgacagcaggttgataagctacacttaacttattataacagaggtgaaataatatgatgatcttacaaattaatcagctatccaaatcttttggcgctgatcctattttaaacaatataaagcttgaagtcagatctcgggatcgcatcgccatagtaggcagaaacggagccggcaaatcaactctccttaaaattatcgcaggtcacctttcatatgaaaagggtgaattaatcaaaccgaaagaattaacgatgggatatcttgcccagcacacaggcttggaatcccagcttaccataaaagaagaactgctgagcgtttttgatttcctgaaagcaatggaaaaagagatgcgctctattgaagaaaagatggccacggccgccccggcggagcttgagacgctgatgaaaacctatgacagacttcagcaggatttcaaggataaaggcggctatcaatatgaagcggacgtccgatctatccttcacggactcggcttcggaaaatttgacgattccgtgaaagtgcaaagcctgagcggcggtcagaaaacaaggcttgcgctcggaaaactgctgctgacccagcctgatctgcttattctggatgaaccgacgaaccatctcgacatcgatacgcttacatggcttgagcattatttacagggatattcaggcgcaatcctgatcgtttcccacgacagatactttcttgataaagtcgtcagccaagtgtacgaggtctcccggacagaaagcaaaaaatacctcggcaactacagcgcctatttagaacaaaaagctgagcagtatgaaaaagacctgaagctgtatgaaaaacagcaggacgaaatcgccaagcttcaagattttgtcgaccgcaatctggccagagcttctacaacgaaaagagcccaaagcagacgaaaacagcttgaacggatggacgtcatggcaaagccgctcggggatgagaaatccgccgccttccgttttgacattacaaaacagagcggaaacgacgtcctgcgcgtacaggatgtttccatcagctatgacggccagccgccgctcttgaaaaacctgaccttcggcatcacaagaggtgaaagcgccgccctcgtcggaccgaacggaatcggcaaatcaaccttgctgaaaacgattatgaacgcgatcagtccggaatccgggtcgatcacgtacggttccaacgtcacaatcggctattacgatcaggagcaggctgaactgacatcgtctaaacgcgtgctggacgagctgtgggatgaatatccggacatgccggaaaaagagatcagaacatgcctcggcaactttctgttcagcggagacgatgtcctgaaaccggtccgttcgttaagcggcggggagaaagcaagagtcgcgcttgccaagctgatgcttcaaaaagcaaactttctcatccttgatgaaccgacaaaccaccttgacctggacagtaaagaggtgctggaaaacgccctgatcgactacccgggcactctgttatttgtatcgcatgaccgctactttattaacaggatcgccacaagagtgctggagctgtcacctgatcatgcagaagaatatttgggagactatgactattacaccgagaaaaaagcacagcagctggaactggaagaaatgaagcggcaggaaaaggagcaggctcagcctgccggcaaggtcaaacaggatacgaaaagaacttacgaggaagaaaaagaatggaagaagaaagaacggcagcgcctgagacgcattgaagaaatcgaagcggccgtctcatccgccgaagagaaaatcagtgccaatgaggagctgctgtgcgaccctgacgtgtatcaggatcatgaaaaagtacagaccattcacgcggagaatgaagccctgaatcaagagctcgaaaacttattagcagaatgggaggaactctcctcagaagaatagaaaaagtcaagcacctctttaaggggtgcttttttatccacagctatcctccttgtcagccatttaagtaagcgctttatacacactatccacaaaattttctgactttatccactttactaacaacttacagccccttatccagcctggatttttggatatattcacaatcctgtggatatgttagaattatctgttaataagtaaaaaaaagcctcacgttttacaacgtgagacgatcaaaggatgttaattccaaaccgggctgtccgttcatatcatatgagccccgaatccccttttcaaaagcaacggttccggcagccgcaatcatcgctgcattgtccgtgcataaagaaagcggcgggatgataagctcgggatctcccgaatggctgaattcctgctgcagtgcggctctcagccctttgttagcggctacgccccctgccagcagcacttgtttcaccccgtattctttcgcggccttagaggtttttgccgtcagtacatcaatgacactctgctgaaagcttgcggcaagatcctccggaggaatcacctcatttttttgcgaggcgttatgaagcgtgttaatcacggctgacttcaggccgctgaagctgaaattgtaagacccttcttccagccacgcacgcggaagcggaatggaatccgttcccacagcagccagcttatcaatctgcggccctcccggataaggaagccccatcgttcttgccactttatcgtaagcttcgcctgcggcatcatccagtgtttcaccgataacctcgaatgaaccgtgccttttcatataaaccaattccgtatgtccgcctgacacaaccaaagcaagcgccgggaattgaagctctcctatcagcctgtttgcataaatatggcccgcgatgtgatggacgccgactaatggtatttgatgggcaaagcttaacgcctttgccgcattgactccgattaacagggctccgacaagtccgggtccttccgttacggcaatcgcatcaagatcatcaaagcccatctccgcttttgaaagagcttcctcaatcacaagggtaatctgctccacatgatgtctggacgctatttcaggcacgaccccgccgaaacgtttatggctttcaatttgagaagcgacaacgtttgaaataatttcattcccgttttttacgactgaggccgctgtttcatcacagcttgtttcgattcctaatacataaatatcttgtttttcactcatgtaatgtcacccacattaataacgcatcttctccgttatctgtatagtattgttttctgattcctccggcctgaagaccgaattttttatataaggattgggcgggatgatttgagaccctgacttcgagagagagccttctcgcctttttttctctgcacaattctatcgcagagcgaaacagcgcttctcccaatgattggccccgatattccggcttaatggctatgttcgtaatctgcgcgtcatctataataatccagattccgcaataccccgccagacagccgtccttttcaatgacaaggtagtgggcatacggattttccaaaagctcatgataaaatgaatccttcgtccacggagaagtaaaggatgctgtttcaatttcataaatttgatcaatatcttccggacgcatgcttcgaatcgccgttttcgttttcatccctatcaccctatttttgagattccatccatttcgcttcagcctctgccagacgcaaataatccggaacaaggctgtggacatccccttcctctttttccaagcctaaaaacgccagctctgacggccgcggattatgctgtgcagccgttccaatcactgcttgagatgtcaattcatgaagaatggtttcttcatgaatggctgtatcgtgccctaaaaataaaaccggagacgctttttctttcagcatgccgagccaatcagtcaaaaggacattctgatcaggaataacggatcgtaatcggccgtcctgatattcataaagccccgtatatacctgtccgcgccgggcatcaaataacgggcagatcagtccttgaaagtgccgtccgttagccgccagcacctccagactcgagacagcggaaaccggaagcttcagcgaccatgccaatgtttttgccagcgtcacaccgattctgacacctgtgtacgaacccggtcctttcgctaccgctattttcgtaaggtcctgcggtgttaggccgcaatccttcagcaatgaattgacagcaggcatggcccgcacggaatgattcttttttaaatatgtaatatactccgccatcaccgttttgtcacgaacgagcgcggcacccagtgtgtaatttgacgtatcaattgccagtattgtcatgtttatttatctcctcacaaagcgtttcataccgtgttccgcaagccgtaaaggtaatgtcccttgcctcatcaccggctcttgtgatgacgatctgcagccgttcagcaggcagctgatcctgaattaaatgagcccattcaattaaacagacgccttgtccctcaaaatattcttcaagccctaagtcttcgctttcatcctccatacgatacacatccatatgatatagaggaagcgaaccgtcatggtattcttttataattgtaaaagtcgggctgtttaccactctcgtgattcccagtccttcggcaaaaccctttgtaaaagtcgtttttcccgcgcctaagtcgccttccagtgtcaaaatgtctcccggctttgccaaagaagcggcaagcttggctacggctttcgtttcttcggggtttttcgttctccattgtaatgtcttcaaagtgagtcacccgtcttatttaaaatgattgtatccttttttctcaaggacgatttgtctctgatcattggctgtcaaaagaacacatgcttccttccgttcagataccgctcctatcttcgcaatcggaatgcccgattgagtgcagtaatcaagcaaagaggtccactcttgctgagaaaccgttccaaccaattcaaaatcttcaccgccgaataacacccatttcttccactcagaatctgcctcaggcaaatccggatgcaccggcagaagttgttcttcaatttctatcgtaactgaacttgccgcagctatttcatgcagctcactggccaatccgtcactgatatcattcagagccgcgcgctgaagctgagagcagaagcggccgacctgaactctcggaacgggccgtttatgtttttggataaaataatcagtcgtatgaaaagcagaagggagtgtttctcccaataaaagagacagtcctgctgcggacgaaccgatatcccctgtaacaaacacagcatctccgggtcttgccgagcttcgcagacaagcgcaatccttctcaacttctccgatgacagtaacggtaattacggcttgaccggaagcggagacggtatctcccccgatcaaatccatttgatatagtttcgccagttccgccattccttcatacattgcctggacgtcagctttctgccagcaagaaggaaccgctagagacaccaaataaaacttcggaatgcctcccatcgccgccacgtcactaatgttaacagcaagcgccttataaccgatatcatgaggagaggaatactctaatttaaaatgaacattctccaccattgtatcaaggcagacaatttgctgcatgtggggtgatgctgtataaaccgcaccatcatcaccgatccctacctcgacggaaggatgataatgcgaatgcggtgtaatactgtgaatcaaatcaaactcatccatatatctcccgtctccctttctgacgctcttgtgaaatacagctctttctagtgtatcggattatgtttcaatatccaagactttaacgatataaaagaaagcttggttagataccaagctgccagcattaaaagaaaacacaaaaaaaacgaaaacatgatcgtttcgtttacaataaaaatggcggtccggacgggactcgaacccgcgacctcctgcgtgacaggcaggcattctaaccaactgaactaccggaccatttattttttggttgcgggggcaggatttgaacctgcgaccttcgggttatgagcccgacgagctaccgaactgctccaccccgcgatgataaaattttagaaaagcttggcggcgtcctactctcacagggggaaaccccccgactaccatcggcgctgaagagcttaacttccgtgttcggcatgggaacgggtgtgacctcttcgctatcgccaccaaaccattgagagtgttctctcaaaactagataacagtaagcatacattcaaattggttaagtcctcgatcgattagtatctgtcagctccatgtgtcgccacacttccacctcagacctatcaacctgatcatctttcagggatcttacttccttgcggaatgggaaatctcatcttgaggggggcttcatgcttagatgctttcagcacttatcccgtccgcacatagctacccagcgatgcccttggcagaacaactggtacaccagcggtgcgtccatcccggtcctctcgtactaaggacagctcctctcaaatttcctgcgcccgcgacggatagggaccgaactgtctcacgacgttctgaacccagctcgcgtaccgctttaatgggcgaacagcccaacccttgggaccgactacagccccaggatgcgatgagccgacatcgaggtgccaaacctccccgtcgatgtggactcttgggggagataagcctgttatccccggggtagcttttatccgttgagcgatggcccttccatgcggaaccaccggatcactaagcccgactttcgtccctgctcgacttgtaggtctcgcagtcaagctcccttgtgcctttacactctgcgaatgatttccaaccattctgagggaacctttgggcgcctccgttaccttttaggaggcgaccgccccagtcaaactgcccacctgacactgtctccccgcccgataagggcggcgggttagaaggtcaatacagccagggtagtatcccaccgatgcctccaccgaagctggcgctccggtttccaaggctcctacctatcctgtacaagctgtaccaacattcaatatcaggctgcagtaaagctccac

SEQ ID NO: 5 - DNA, 240395 bp, Bacillus subtilis
catcgtttacggcgtggactaccagggtatctaatcctgttcgctccccacgctttcgctcctcagcgtcagttacagaccagagagtcgccttcgccactggtgttcctccacatctctacgcatttcaccgctacacgtggaattccactctcctcttctgcactcaagttccccagtttccaatgaccctccccggttgagccgggggctttcacatcagacttaagaaaccgcctgcgagccctttacgcccaataattccggacaacgcttgccacctacgtattaccgcggctgctggcacgtagttagccgtggctttctggttaggtaccgtcaaggtgccgccctatttgaacggcacttgttcttccctaacaacagagctttacgatccgaaaaccttcatcactcacgcggcgttgctccgtcagactttcgtccattgcggaagattccctactgctgcctcccgtaggagtctgggccgtgtctcagtcccagtgtggccgatcaccctctcaggtcggctacgcatcgtygccttggtgagccgttacctcaccaactagctaatgcgccgcgggtccatctgtaagtggtagccgaagccaccttttatgtctgaaccatgcggttcagacaaccatccggtattagccccggtttcccggagttatcccagtcttacaggcaggttacccacgtgttactcacccgtccgccgctgacatcagggagcaagcccccatctgtccgctcgacttgcatgtattaggcacgccgccagcgttcgtcctgagccaggatcaaactctccgataaagtagtttgactgactacgcacatcgctgtgcgatttatttaaaactttgaattaacaggtacgttttgtcttgtttagttttcaaagatcattataatggagcgggtgatgagaatcgaactcacgacatcagcttggaaggctgaggttttaccactaaactacacccgcgtttgaattggcgcgcccgagaggagtcgaacccctaaccttttgatccgtagtcaaacgctctatccaattgagctacgggcgcttatcaggcgacttaactatcatactaccaatcggttatgatgtcaagtgtttttttatttcttttcaaagtctttttctcgacctcatttattatacacgctttcgagaatttgtaaagtcttttttcaaaagatcattttctcatttgtcgttatcgctttgttcatcagcgacgtctaataatataccatgcactttaaattaggtcaacacttttacgaaacttttttctcacttattattcccttctatgtaataaataaaaaagcaggattcccaggaaccccgcgtctattcagattacccgctcaccttggcttccgcgctattacgatctgttttttcataagcacggaagttttgttcaagctgttcgagcgacagacctttcgtttccggaaggaaccttttcacaaatataacggacgctatccctaacaagacaaaaatgaagaaggttgcagacaatccgatgtttgcgagcaggaccggaaaagtgaaacccacaaggaagttcacgatccagaggcagaagacagtgacccccataccaagtccccgcaatcgaagcgggaatatctccgacagcatcagccaggtcaccggagagacagccccctgctgaaacgcaaggaaagtgactgttaatgaaagaaccacataaggaagagcgggcgatcctttcagcacgacagacagaactccgatcaaaagcagcaccgcagtcgttccgatcagccccgtcatcagcatcgggcggcggccgactttgccgagaagccatattcctacaaaagtcgcgagcaccgaaatcacaccgttagcgatattgccgattaatgcggcttttgtctcgaaaccggcatcttttaaaatttgagttccataatacataattgaattcacgccggtgagctgctgcactaccgcaattccgatcccgacaaacacaatgcggcgcacccacggaacggcaagatccttaaaggcggcctgctccatctcagcttccttatgaaaggcagattcaatctcagcgagctcagacttcgctttctcttcattccttattcgccggagaacgcgcagagcatcttcttttcttcctttagaaaccagccagcgcggactttcaggaactttcagcataccgaaaaacaagaataccgccggaagggccgcgataacgagcatatagcgccaagcgtgagaggtatcaccaagcacattgccgatgatagcattacacgtgaaggcaagcagctgacccgttacaatcatcaattcattttgggtaaccattctccctcggctttccgccggcgacatttcagccaaatatgccggtacggttacggatgctcccccgacggcaagccccagcagaaaacgggagatgatcataaccgatacgttaggcgccagtgtacatccaagcgtcgctgcaaagaacaaaacggcaaggataaggatatttttacgtctgccgttatagtccgacaatctccctccgaaaaccgcgccgatcgcagcccccaagagcagggagctcgccaccatcccttcagtcaaagcggtaagattaagctggtcagcttccgccataaacggcagcgccccattaatcacaccggtatcgtagccgaaaagaagccccccgaatgtcgatactaaaatgatggttctcaaaaatgaatgctggctgctatttttattcatcttcaaatcctcctagtttttacacagagataatatcggaatattcagttatcaatatttacacctctaacatctgcatacaagttctgaccgtccaaaacagttatataagaagaaaatgttccgaaagcgttatcatttatagtgattattcgctctccccctctcgtcatattgttattttatagttactttgtagtgaagttataatgatattattggcacttatgttattatcataattttaaaagcgctttcagtcaataaatatttcataaaattttataactcacctttatattacctatatataatcaattttcgttttatatcaatttatttccataacatactcaatgaattacccctattataatcaataattgattacatattgaaaacccccaactgctgattgggggtttttgttttattcttcgtttattgtaacaatcgttctccctctcgcttctccttttaaaagggcaggaagcgtatccggcagctcttcaagtgtaatttccttttgaataaaggcctccagatctgcaggcttgaagtcatcagctaaacgctgccatattttctttcttgtctccatcggacagaatacggaatcaattcccaagagattgacgccgcgcaatataaacggaaagactgtagccgggagtttcgttcccgctgtcagtccgctcacagcaactgatccgccgtactgaatctgactgagaactgaagcaagcggctcacctccgaccggatcgacggccgctgcccatttttgtttttgcatcggttttaacgtgccgttatacacttcgtcacggtgaatgaccgtctttgctccgaggctcttcaaatacccgctttcttcttcttttcccgtactggcctcaacctcataacctaaggttgaaagaatggagacggcaaagcttccgacgccgcctgtcgctcccgtcaccagcaccttccctttttcaggagcggcatggttttcttcaagacgccggacggacaatgcggcagtgaagccggcggttccgatcgtcatggcttctttaagtgtcagaccttcaggcagcggcacgatccaatctgccggaatgcgggccatcccgctatagccgccaaaatgggaaacgcctatgccgtagcttgtcgcaatgactttgtccccttctttaaaacgggcgtcctctgaagaaacgacgattcccgctaaatcaattcccggcacgaaaggatacgacgttacgatcttgccgtcaggaatggcagccaagctgtctttataattcacccctgagtagcaaaccttaatcagcacttcaccctcgggaaggtcctgaaccgccagctcccgtacgctgactgaaaaccggtcttcatgttgatcgactactaacgctttaaattgatctgtcatcactacgtctccttaaaatgaattgaatggctttggaaaagcataaaataagtttgatttgttttcaaatgtcctgtcctgtgtagtatgatcaaaagtaaaaacagcgaaagagtggttacgcatcatgtctgataaacaaaacaaagataacaaaaacaacaacagcaatcagccattaccggacattattcataccgccgttttcaaggcgccgatacaagttgtctgggatacggtctctacggcggacggcctgtctctctggtttatgccgaatgatttcacacctcaagaagacagtgagtttcagctggaatctccgttcggtccgtctccgtgcaagctgctggatattgaagcgccgtaccgcctttctttttcatgggatacggaaggctggatcgtttcttttgtcttaaaggaaacggaaagcggggatacggaattcactctcattcacggcggatggaaagagccggaagccgtcatcaataaagtcaatcggaaaagctccgagattcacagtacgatggatcaaggatggaacgggcttgtcaacacgaaacttcgcggggcggttgaggcttaacacaaaaggacggacacggtttccgtcctttttttgatgccgatacataaaaactgaatttgcaaagacactaacagaagaaccgaaaacttctttcagggggcgctgtttatgtattattacaaagaagagctgatcaatatcattaaaccggacaagccggacccggccgcggccaaggtgcttcaggaaattttaggcgggcattacggggaaatgcggacgatgatgcaatactttttccaaagctctaatttcagaggaaaagaaaaacagttccgtgacctgcttcgcggtgtatttttagaagagatcgcacacgttgagctcgtccagcatacgattaatgcgctgctcgatgaaagcggcgctgagggcgccggaaatcaggcagcagatcaggcgccgcttgacgaagcagttaaacacgccaatccgcaccattttatcatcggggcgcaaagttctcttcctgtagacgccggcggcaatccatggaacgggtcttgggtatacaaccacgggaatctgatttccgatctattggacaatgtcgtgctggaatcaaccggcgtgctgcaaaagacgcgcatttatgaaatgagttcaaatcagacgttcagagaaacactcggttttctgatcgtccgtgacaacgcccatcaaaatgcatttacaaaagcgctggaaacactgggtgtcgaatggggcaaattatttcccgtgccgaattatgatattgaaaaatacccggaatgccggaaattcgttgaaatgggttatcataatacccaatttaatttcagactggatccgacacggatcggagaaattctgcagggaacgacgccgagccgaaacggcggcgaattaagtgtgtccgagcctcctaaaggtttccccgtcccggaacttcccgagcttccgaatgagcacagccccggactgaaagatatgaacttgtaacaaaaaacgcctgtttcgggcgttttttgtttttctgaatatgaggtttgaatgtgttcaaaacggggaatataagccgggagatcttgccatacggccgttattttgatgtgagcacattgcggtacatacttcgtttcgaaagttgtcctaattttccagccggccggctgggtatgtttgaatgataatgggaattatgtaaagagaacaatgtcttttttaaggaggcagcgaatgtctaagcaaggaaacttccagaaaactatgtcactttttgatcttattttaatcggcatgggagccatattcggttcggcatggctgtttgccgtcagtaacgtcgcctctaaagcgggcccgtcaggcgttttttcctggctgatcggcgggggaatcatcttattgatcggcttggtttatgcggaactgggcgccgcgctgccgcggaccggggggattatccggtatcccgtatattcacacggacacctggtcggatatttaatttcctttgtcaccattgtggcatacacgagtcttatttcaatagaagtcacggcagtccgccaatacgtagcgtattggtttcccggtttgaccgtaaaaggctctgattcgccgacaattaccggatggatattgcaatttgcgctgctctgcctgttcttcctcctcaattactggagtgtcaaaacctttgcgaaagcaaacttcattatttcgatttttaaatatgtcgtaccgattacggtaattgttgtactgatttttcattttcacccgggcaatatgaccgttcacggattcgcgccttttggtttcaccggaattcaggccgcgatttccacaggcggcgtcatgtttgcataccttgggctgcatccgattgtggctgtcgcgagtgaagtgcagaatccgaagcggaacattccgatcgcattgattgtctgtattatcgtttctactattatttacaccgtactgcagctcacttttatcggggcgatcccggcggataccctgaagcacggatggccggctatcgggactgaattctcccttccgttcaaagatatcgccgttttgctcggtttggggtggctggcgacattggtcattttagatgcgattttatcaccgggcggtaacggaaatatctttatgaatacgacttcacgtctcgtctatgcgtgggccagaaacggaacattattcagcattttttctaaagtcaataaagaaaccgggacaccgcgcgcctccctttggctttcgttcggtctggctgttttttggacgcttccgttcccttcttggaacgctcttgtcaacgtatgctccgtcgcattgattctgtcttatgcgattgcgccgatttcttctgcggcgctgagagtcaacgcaaagaacattaacagaccgttttatttaaaagggatgagcatcatcgggccgctgtcgtttatttttacctcttatattgtatattggtccggatggcgcaccgtatcctggcttctcggttctcaaattgtcatgtttctgatctatctctgtttcagtaaatatgctcccaaagatgatgtcagcatacgccagcagctgaaatcagcatggtggatcgtcggcttttatgtcatgatgctgattttctcctatctcggctcgttcggccacggattgggcattatcagcaatccgcttgacctgattctgatcgccatcggttcgctcggtatttattactgggcaaaatatacgggtctgccgaaggctatgatcgacagtgataaatgacgaatgccggaaagaagtatggtcttctttccggtagttttattttaagggatgacaaaaaagcgaacatacgataaaatgaatgacagtcattcataaaaggaggaacccctctattggcaaaacaaagctcgggaaaatacgaaaagatcctgcaagccgcgattgaagtcatttctgaaaaaggattagacaaagcatccatttcagaaatcgtcaaaaaagccggaacggcccaaggaacgttttacttatatttttcttctaaaaacgcactgatatccgcgattgcagaaaacctgctcgacactacgctggacagaataaaagggaaaacggacggttctgaagatttttggacgttgctggacattttggtagatgagacatttcacatcacccggcttcataaagatattatcgttctctgttattccggtcttgccatcgatcattcaatggagaaatgggaagccatttatcagccctattattcctggctggaaggcgtgatcaatacggccattgaacagggtgaggtccacagcggcattcatgtcagatggacggccagaacgattatcaacgttgtcgagaacgcggctgaacggttttatatcggctgtgaacaggatgtcgatctcgaagtatataaaaaagaaatattcagctttctcaaaagaagcttgcagaaatgattggcggagaccgatcatttttgaccgccgtaaaaatgactgacattcattcataactgaggtgactgtatcatgtattggctgcttgtattgatagccggactgttagaagtagtttgggcgtccgccctgaagcatgcggattcgctctttgattggattggtattttccttttgattgccgtcagctttctgatgctgatccgctcttataaaaaaattccgatggctgccgcatataccgtttttgtcggaataggcaccgtcggcacatatgtaacgggcgtcattttaggcgaatcgttttcaatcgggcaaatattctttttggctttgctgttgtccggcattttaggaatgaaggtatttacgaaagaaactgaaacaaggggtgaacattaatggcatggctgctgttatttattgccggagcggaggaagttgtagcggccgttgccatgaaacatattgacggttttaaaaaaaagtggccgctgattgtcatggtaacaggctttatgctttcattcttttgcctttccggcgcgatgcaggttcttcccacaggtgtcgcgtatgcggcttggaccggcatgggaagcatcggcgtttcggccgtgggcatactttggtttaaagaaaaattcaatctgtcacaattggtgtctctggggcttatcctcatcggtgtcatcggcttaaaactgacagcgtgacggcctgagacagcttttcaaataaaaaacaaaggaccctaaacgagccctttgtttttttatgctgttttgatctgttctgcttttcccgctccgactccgaaaataaatatcagaacggagactgcgatcagcatgaataacggaaccgtccagccgtgcgtgatgtcatgcagcaaaccgaatacgagcggcccgaacgcggcaagcaggtatccgaatgactgagccatgccggaaagcgccgcggcttcatgaacatgccgtgtccgcaggctgaagaacatcatcgccaagctgaacgcacatcctcccgcaattccgattaaaatgacccatagcggagtgagagccgggcttccgaaaagaacgccggcaatgccgataaggaaaaataaagccgtcagtccggcgagtgcgcgctgatttttcattttagcggcagcgatcggcacgataaaagtaatcggcaggactgagaattgcattaatgaaagcatccatcccgccttacttgagctgagaccattctgctgaagaatttccggcagccaagcgatgacggtgtaaaaaataagggattgcagccccatgaacatcgtcaccttccaagcaagcggagaccgcagcagactgcttttcttctctccgtttgtcccagtcgtgcggacgggcagttcgcgtcctcgcatttgcggaatccacatgacaaacgcaatgaaagaaaggatagcccagcagccgagcgcgcctttccagcctaaccccgctgaagaggcgatcggcacgctgatgccggatgcaatcgcgccgcacagattcatagaaaccgagtagacgccggtcatgatgcctaaatttccgggaaacttatgtttaatgagactcggcagcaggacgttgcatacggcgatcgacaatcccaacagaatcgttccgaaaaagagagtgccgattccggcgatggagcgcagcagagttccggctgtcaggacaattaatgatgacagtaagacaatctcggtaccgaagcgccgggacaataaaggaacaaacggtgacagacatgcaaatgccaaaagcggcactgtcgtaatggtgccggcagccgcattggtcatgccgaggctgtcccgaattgaggaaacgagcggcccgaccgatgtcagaggcgctctgaggttggcccctatcaatatgactccgatgaccagcaatatcagttttttacgctgacttgcttgcagaatttgatgttcgtctttaattttcatgttcatcctccatgtgtattgtatctttaaatactgtgatgtattggttgacggcctccatggcctgatccggtttctgtccgataatcgcggcggcaagctgggtgtggatccgtatagcaggggtgatttccaacaggttatggactgacgcacaaagcgcctccgtcatatgctcgtaaagatcagaaagcatgttgttatgggccgcctgtacaatggttttgtgcagtttaatgtcagcctcggcataccgttttcgatcttcattttgcaaggccgcttcacattcatccaagcacaccttcagtgctttcaggtcttcgtcattacgcctttccgccgccaatcgcgcagcttctcgttcgagtgcgtatctgacttctaatgtttcaagcaaatttgattttttaatatggcggtaaaatgccgcgccgagaacactggatgagctgacatacgtaccgctcccctgccttgtctgaagcaggccggcatgtacgagcgcccgaatggcctcacgcaatgtgtttcggctcacatcaaattgcttcattaaatccagctcagggggaatgcgcgtcccgaccggccatttatccgattgaattaacgattcaatttgcgtcaccacttgttctacgagcgacagtctgcttgttttggatatctccatcaaaacacctctgaaatttgtaggatgattctatcattgggtaatataacataaaagaagcgaagatgtaaatcagcggcaacaaaaaaagagtgagtttttctctcactcttcggcgcttttatgaacgttttatattgactgaggtcacgacaaacttgtcatgacggtggcgggaaaatgaatattcaaagggagtgccgttgtccaaaaagcctacatgctcgacttcaagtatcgggtcatccggccggcagccgagatattgctgatccatatcatccgacttgcacgctctgatttttctgtgtgagcctgcgattttgagctggagttcccgcgtaatatgatcgtagatggaatggttgagcacctcgtcattaatgccgggtataaggctcgccggcatgtacgttttttcaagaacgtacggttcgccttcaacaattctgagccttactacataatagacgggagtcttttcatcgatggccaaatgtgcggcgacatcttgagacggaaactgcacttcaaaccggatgaccttgctcttgatattttttccttttaacaaattgctcaagccgagaatttcgttgctgactacgtgaacgtgctcatcctgcatggctgattgaatgataaacgtgccgtgccctctttttctgaaaagcatcccttcagccgcaagtgtatcaagcgcccgcttcattgtcatccggctgcacccgaactccgcagcgagcgtcttttcatccgggatcggctgatctatgtcatatacactgcttttaatcctctttctcatttcgttggcgattttttcgtacttattcatcggtttcctccggctgtataatgtttgatctgtatagactccttacggttatcataaatttttttcccggcttcatcaatgacgttacagccgccgatattgaaaatgaaaggatttccttgaattttctatggaatctccctcactattatggtagaattttttgcagaaacggacacaaccgaatattgcatacattgtataacctcaatgatatggtttgagggtgtctaccaggaaccgtaaaatcctgattacaaaaattgtcccgtacactttttgtaatcaggattttttattttctaaaaaataaaaaaaggagtatctgtacatgaatttcaaagtatttctgcttgcagcatctaccatcgcagtcggattggttgaattaattgtgggcggtattcttccgcaaatcgcttccgacttagatatatctatcgtcagcgcggggcagctgatcagcgtgtttgcgctcggttacgcggtatccggcccgctgcttttggcggtgacggcaaaggctgaacgaaagcggctttatttaatcgcactgtttattttcttcctaagtaatctggtggcttatttcagtcccaatttcgccgtacttatggtgtcacgggtgctcgcttccatgagcacagggctgattgtcgtcctttctttaacgattgctcctaaaatcgtggcgcctgaatacagagcgcgggcgatcggcatcattttcatggggttcagctccgcaatcgctttaggcgtgcctgtcggcattatcatcagcaatgccttcggatggcgcgttctgttcttgggaatcggcgtattatctctcgtttccatgctgatcatcagcgtctttttcgaaaaaatacctgctgaaaaaatgattccgtttcgtgagcagatcaagacgatcgggaccgccaaaattgccagcgcacatcttgtcaccttgtttacattggcggggcattacacactctatgcctactttgcgccttttttggaaagaacgcttcatttgagttccgtttgggtcagtgtatgctactttttgttcggtctgtcagcggtatgcggcggcccgttcggaggctggctgtatgaccgtttaggagcatttaaaagcatcatgcttgtgaccgtttctttcgctctgatcctgtttattcttccgctgacaacggtttctttaatcattttcctgcctgcgatggtgatctggggattgctcagctggagccttgcgcctgcgcagcaaagctatttaatcaaaattgcgcctgagtcttccgatattcagcaaagcttcaacacgtccgctttgcagatcggcatcgcgctcgggtcagccatcggcggcggcgtgatcggacaaaccggttcagtcacagcaacagcctggtgcggcggtttgattgtcattatcgctgtcgcgttagctgtattctctttaacgagacccgctttgaaaagaaaatccgcataaatgtgagaccgcaaaaaagccaaaggagttccttcggcttttgcggtctttttattttgcggcagcaagctcgtcttctgtcacccatttatgattggttactttttggccgccgtcagtcggtgtatagtcgaccatataaacggttgtctttttggctgaatcaataacggcttcggcgcccttcatgcctttcatatgggatgcctcgatcacggccttgtcacccggttttaacgttttattaccggcgcccttcagctcttcctgaatgacccatttatgatcttcgacgcgctttcctcccgtttccggagtgtaagatacactgtaaaccgttgtatcataagcaccttttacggttccttgcgcatttttcatgcctttcatatgagaagctaaaatcatgacgtcactgccgaccttataagtcggattttctgccttctttaaacctttcggcacctcggatgaacctgagtgattcatgtcttcgtgagagtgcgtttctttgtctttcgctttttcgcttcctcctgaagattggctgttgcatccggcaagcgccagaacggggatcaggagaaacatgctgaataaaaatagtctcgctttcatttcaagaactcctttgcctttttgatttttcactttccctttcgtttcttcagtaaaacaaaaagatggcctgtcatttctcctaattcttcaaatctctctttattgcctttcatcaggtgaaattgttcacaaaatgtacacattaatggagatgcagtataattcaattatcagataatagggggaactcatcatgaaaacgaaggtttttgcggtggtattgggcgctgttttaatgattgcggggttggttttggcagaagtttcgctttatatggaatacatcacaatgctcggagctatgattttttcttctatatttatgtcagagccgaaaagaaaatttcgcgtcatcaaagaggtttgacttttctattaccgccgtcttctcaggacggcggttttgttttgcatgtcactcagtctatccgcacagccgtttcttctgtaccgtcctgatataaaacgaaatgcggggctgtttgtgctttatcacctgcaaattcaatttcaagcggcagcgccctgacaaaataacgggtttccgtcattgggaataattcgaatggagtctgcccgtctattgtaagatacaatcggttttcttttaccgccaccgatgcatgtgtgtcatcctgaaatgagtaattgccggtaaatctgctgtaaatcgcaggatcgatatctgcttttttctgatccgccggacgtttcggaatcacgtacggctgatcaaataagatgtttacggccgcggcaatcacagcttgttcaaattgatacgattgttccatattgctgagataaatcagtgttttgttctggtcaatataccggatcatcagagttgaatagcccggccagcctccgtcgtgactgataaccttccctttttggcggctgttttgaatcatccagccaaatccgtatccgaattgctcttcttcattccaatagcccggcgtaaacgcttgatctttagactctttgccgatgatttcttccgtataaagagcctgatcaaacagatataaatctctaatagtggagttaacggttccgtcaccttgaatcccgtcaagaaagacgacataatcggtttcctcaagttcatccggcagcacatattctccggaatgaacatcatacacatagccatatgcatagttcggaatgttttctttactcagccttctgttataaatccgcgtatcgtgcatacgaagcggatgaaatacggcttgtttcataaattcagcaaaactcatgcccgatacaatttctataataaccgctaacaccgcataccccgtattactgtaaagccactccttgcccggcgggaaataagcatccggtttatgctgcttaagcatatcgatcacatcttgattaacggcaattctgtcccggtcccaatgtgttaaaaataactccatatagtccggcaatcctgacgtatgatggagtaaatgccgaatggtaatgcccggataaggaaaatcaggaagccaccgctctatcatatcgtcataacgcagcttcccttgctgctctaaaatgataacgcctaaagctgtaaacggcttcgatactgaggccaattcaaagaccgattggtcattcagcatcctctttgttttcagttctgcagcgccgaatgaaccctgatataagatgcggccgttttccgctgccaatacagctccgtttatttcatgtctttcgtctaaagtgctgaaaagctgttcaaaagcttgttttttcttatcgttcatttcacgaacccccatatacaagctgatttactcttttatacgaacagccgctttagaagtttcaatattttcccttccctgaacaccagtcagtaaactgccgttcaggcagccgcggaggtttaatgaaggtcttttattcgcacaacactgtgcaggcttcgaactcaacatgcttctcgtctttttttgcgccggcaatttccatagtcgaaaacatcgcacagacgacggctttgtattcgttcatgacggtttgaatttcaatcagaaaccgttcggatgaagaggcgtattccgttacgtattctttcattttgccgataatatcatctgcctgacggatgaagccggccgcctccaagtcactctcaaactggtttttgttgatcatatgaatatgcatttttcaaggcccctttcagcagcgttttgtggttatccactgtaaaggacaggcttggataaacttttaataaaatatgaacaaaatatgaattggctcatcggcctgaccggcgggctttcggctgtgctccgtttcatttggactacctgaaataatgacttctttactctatgaaaaacagctcatatatgatctaataccagtaaaatgaacgttaggaggcggcctatgtcagcagcaggaaatcggcaaaaattttgggtcatggcgatgcttatagcggtctttgccgtgtttgttttctctttttctgagaatcattcacaaaagaactggcacacggcggttgaccaggcgtcagtgaatgtcttcggccagcagatctttgaaaaagaccgtctggcaaaaacactcgacgcacgtgaggcagaatctcttctgactcttgtgaaacttgcaaatgaagaacatcacatcatctaaaagccattataaaaagcctgtttccctttggcagaggaaacagctttttccatgtattattgagcatgtttttgttcaataaaccggtcgatccgggccagaacatccttcatgtccatacattctttaaagctttcattaatggcttgaatgccttgtttgtattttccgttatgcagcacttcttccgcggcaagctttaccttttcagcgctcacttcatctttttgcactgtatagcctgcatccaattcagtcaggcggcgcgcaaccatcggctggtctttatcatgcggaataacgaccagcggcacttgataatgaatgccttcatttacactgttcattccgccatgcgtgacaaacacgtcggcctgctccagcacttcaagctgcggcacgtacggggcgatgataaagttttccggcgcctgtttgattttcgacagatcggctttttccccggcggcaatgactacttttccttcaaaatctgagaacgcgtctatgcacagattgaaaaacgcttccgtgtccccgagcaccgttcccattgagatataaatgactttttcattctttaatgagtcaatcgggaagtcgacgcgcccttttctcttcggaaaactcggaccgataaataaatactcatctccgaatgtctcactttcgggctgaaaatatctgcttgtatagacgacgttcaattcacctgtgttgttcataaattgaaccatgctgtcaggggcgacaccgtatttgtctttcatctcggccaacagctcttcacattccctgtccggctgaaacggcacgcccgattccggatggagcggcagtattttcagacggtcttcattgaacaggaaggatgctgaagaagagatgccgggaatgttgagataatcccgcaccagctctcccgcaccgaatttatcataatagacggcgtcgaattgaatgtcctctgccagccgctgcacaatatgtaaaatctccagtgacgttttgatatgaacctttaaaaatgcaagtatgccggacggactgccgggatcaatgggtgtcattctgagcagatcgctgtgaaggtgaactttcgctcctactccttccagtctgcttttgtatttttccgttgagatataatgaacgtgatcgccccgttcgctgaaggcctttgtcatacccaaagtcgggtttacgtgtccttctgcgggaaaattgatcatcagaatatgtttcgccatttttcaaactcctttgccttttttgcgtctcttccatatccatcataaatgacgcggaaaaaatcatgcaaggaacatccgtcaggtctttatgacggttcgatgacatcggcaaaaaaaaagacaaggcttttcaccttgtctatcgtgatgattcgtctgtttcttccgctctcagcacgcctttcagatgttcttcatcatgcttgagatgctccgtcatatattgcacggcttttgttttgtcgcccttttttatttcttcaaagatttttcggtgctcatgcagaataacctccgcacggtcatcgcctttaaaattaagaactctgcaaaaatgaatcagcacattgacatgctcaagcagcatggccagccggctgttatggctgaaatccacaaggagctgatgaaacgactcgttcaaggaaataatctcagtctctttgacgcctttattgatggcttcttccgtcttgcgcagctgtttttcaatgaggtcaatttcactctcagccgcttcatcaataaccagttcgactgccagtgattcaagtgacattctgattttataaatctcttcaacatccttaacggacaaagaataaatgacaaagccgtttcgatcgtctgccgtcagaagcccgtccttttcaaggagccgcatggcttctctgaccggcgaccggctgactccgaaatccttggccagctgagtctcattcagccgttcacccggtttaaaaatcccgtcaaatatcatttttttcaattgggaataaaattgcagataatacgggattggcttatctaatttaaaattatccatctttcctacctcttcatacaatttaggccttattgttaccaagatcatataacagtttatctatggaagcaacattcccgagcttgtcagcatatcggaggtggcgtaatatggaattataatgaacgacggtcgacggtctgccgtaaaccgaaaacaattcattcagaggtgacggaaacatgaaaacatacaagattgccagcataccgggggacggtgtggggaaagaaacagtccctcaagcggagcgggtgttgaatgcgattgccgaattacatggaggcattgcctttgatttcacttcttttccgtggagctgcgagtattatttggagcacgggactatgatgccggatgatggattagaaaggttacagcactttgatgctttgtttttgggggcggtggggaatcaaaaactcgtccccgatcatgtttcgctgtgggggctgctcatcaagatacgccgggaatttgaacaggtgattaatgtgcggccggcaaagctcctgccgggaatcacttcccccctcgttaacccgaaggattttgatctgatagtcgtccgcgaaaacagtgagggcgagtacagctctgtcggcggcagaatctatcagggtgaggacgaaatcgccatacaaaacgcggtcttttcccgacggggtacggaaagagtaatgcggtatgctttcgaactggcggcaagtcggcggaaacacgtcacaagcgcgacgaaatcaaacggtattgttcactcgatgccgttctgggatgacatctttaaagaggtcagccgggagtacgccgggattgagacggattcccagcacatcgatgcactggcggccttctttgtcacgcagccggaacgctttgatgtcattgtcgcttcgaatctgttcggagatgtgctgacagatatcggtgcggcgattatgggaagcatcggaatcgctcccgcagccaacatcaatgtaaacggcaaatatccttccatgtttgagcctgttcacggctccgccccggatattgtcggaaaaggaattgccaatcctataggccaaatatggacggcgaaattaatgctcgattcattcggagaagaggaactgggccatctcctcttacaatctattgaaacggtcacaaacagcggcattctgactcctgatgtcggcggaaaacattcaacggaagatgtcacttccgctattatttctcaaatcaagaacagataatacgaaaaaaccgcgggcagaaaaactgcacagcggtttttttcgtctcagacgggacggatcgcgcagaaacaggccgattcacctgtgaagcccgcaatacggcctgattgatccttttctacagaaaaaaaccgctgtatatcatgaggagcatccagcatctgtttttccagtaatgcggctttctcttcagtcaggcctgcccgttcacaccagacggtaaattgaaatggtttcaaaaagcagacagcggattcaatccggaagccggctgtctccagaaaacggagccattctgtttttttccacgcccgaaagtggctctgatcccgtttcttttcaatgtcattataaaaatggtcatattcatccttttcaggtgcggtattgtcaatgagaagcagtctgccgcccggtttgacaacccgaaacgcttcatgaacaaaggctctgacatcgggaaaatgatgcgccgcgattctgcatgtgacgatatcgaaagcagcatcggaaaacggcatcttttcagcatcgcctttttcgaatgacacgttcgtccatccgtttccggttataaatgcttcagcggctgctaacatttcttccgtgaggtcataggcgataacagagcgtacgagaggagcgagagcgttagccgtatgtccgcctcccgtcgcgatatccagcacgtccatatgcttttcggcaccggaagctgaaacgagatacgccaaatcctctcctgcggcgtgtcctggactagtcacatatttcgcggcgtttttggcaaattgccgctgcgcctgctgtttaattgaatcctccattatactcgggcccccttttctttctgcttgctgccttaatcaaaataaacgggttcgtccggatgtttgagatacgcaaacatcttttcaatctgactttctgtattgcgggcttcagatagcggcggcagttccgtttccgcaaaaaagccggcggcgcttgtttctgttccctccctgatccggccgccgatgatctcgcatttgataaacactttgtaaacgtgggcggcggacggcggatgggaatggcatttcttatccattacagctaacagtttaacgggctttacgtcgattcctgactcctcttttacttctttgacagcggtctcgcccggagaaatcccgatatcagcccatccgcccggcagcgcccatctgccgtcgcttttctctcttaccattaatatgctctgatctttaaaaactgccgctctgatatcaactttcggagtgggatagcccgtgtcaccggcgaatacgtctttgatgacccttttatcgatgccggtatgatgcgccatgatatccacgcttatttttcttatttcttcaaatctctcaatatcatatatgtctttggaataagccagccccgcttgcgccgcggattgaagctgttttgcccattcaagccattttggctccattttttcaccgcccgttatgttaattgacgaaaccccaagagtcaggatattgcaccttgagagtaccggtgcccatgatccgtttctgctccttgttttctgtctatgacggagcgaatcctgccggaaaatcagaaaaaagcaggccgatctcgtcataatggaacagggtttgtttttttacgtggcacagttttgcaaattcacccgttgtgaagtattttctgacgtcttcgctcataatgcctccttgactatacggtaaccatatcctttatgatgatcattgagaaggctgattcacaaatggcttacgtaatgaaagctttaccgtctcaaaaaaagcggaagaggagtatcaagtatgacgattgaaatcagaacagtcacggaagaaaaccgtgccgatatactggcgcttcatgtaagggaaagccagacttcatttattgaaaccgcggaagagtgcttacaagatgctgaggattgccggcattatcagccggccggtctttatgttaacggggaattggtcggctttgccatgtacggatggtttccggaatatgatgaggaaaatgaaaacggcagagtatggcttgaccgtttttttattgatgaacgctatcagggacggggattgggcaagctgttgcttgatgcccttatccgccatctcgttcgaatatatgattgcagacggatttatttaagcctgtttgaagataatgtgcacgcattgcggctttatcaaagattcggcttttcattcaatggagagctggacttcaatggtgaaaaagtgatggtgaaagagctgtaaaccctctgtataaaagcaattcgtcttcttgccaataccttaaatttgaggtaacataaagatattagacgacggtcgacggactacggtcgattattaaaacctgatacagcggagcggaacatggtgatcaggcatctaaatggaggagaagattgtgcttattatactcgttatgtttcttctcgggattattctcgggtttatcggcgcggggggagccggttttgtcattgcacttttaactatactgtttcacgtaccgattcatacggctttaggcacctccctcgccggaatggctttcacaagtttatcgggggctttcagccactaccgtgaaggcaatattcagatgaagatcggtctcatcgtcggcgtttttgcggcattcggttcgtttttcggggcaaggcttacttcccttatccccgcagatttgctgcattacttgacggcgggcatgctgtttttatctgctctgcttattttagtccggttatttattgtaaaagaaacacaagaagattccggacggcaaagcaatctgaacatatgggtgaaagccgttgtactcggtgtcatcgcaggaatcttgtccggaacgttcgggatcggctctgcccctttcatccaaatcggcttaatgattcttttgcgcttatccatccgccagtcggtcggcaccaccatgcttgtcattatcccgcttgcggtcggcggaggactcggttatgtgacggaaggatttgtcgattatatgctgttggtcaaagtgctgatcggaacgatgtgcggcgcatatgtcggagcgaaattcaccaacctcgtgccgaaaatcattctgaaatcagccatctttttaacaccggccatcgccggtctcatgcttttattttaaactgaaacgggaggcggccgcctcccgttttttctgttcttcatctgttttcgaagagctttttcagctttgcttccgtttcggtatgatctaccggtgtatacacactgcagcgcagatcactgttgccctgaacctgaaatgaagtcaggttaaagaccatttttcccgccttcgcgtggcggaactcaattaatacttcgggtgccgagctgacttcgctctcattccacagcgtatgaaattccgaatacgttttctccatttcttctataaactgagaataccacgtatcagctacatactggccgtaatacgttctgaaaatggcgatgaatcctttcacaaagtgctcccagttcacggctaaacttcttaattcttttctggaaaacaatagctctatgagattccgcttttcaggaggaatttgttcaaaatctaaaaacacgtgcgccgcagcctggttccaccctacgatatgacaccgcctgtccgagataatggtgggacaataacggagctcctgcaggatttttgaaagggacgggctgataaccgcttcttcctccgcggtaaacggctgcttcacgccctcctcaatggcaagcgcgtataaataatttctctcatctttgttcagctgcagcgcatcggaaacggcgtccaatacggctgcggacactttaatgtctctgccctgctccagccacgtataccacgtggtgcttacgccggctaattgcgcgacctcttctcttcggagtccgggcgttcttctccgtgtgcccatcggaagcccggccatctgcggagaaattttggcccgctgcgtttttaaaaactctgagagcgcctgcaatcttccttctggtatcataccgaatctctcctctcttaccctggtatttattatactaggataatcaacaacttgtaataggataattgcgagttacaataaatacataccgaaggaggaatgaccatgaaaagagttgtgatcaccggaatgggagtgatttcacctctcggcaatgatgtgcatacattttggaaacacctgacggaaggaaaatcgggaatctctttcatcgattcgtttgatgtctccggctccaagacaaaaatagccggtaccgtccgtgattttgacgcagaagaaagatggggcagaaaagaagcgagacggcttgaccgtttcagccagtttgctttagctgcagcggaacaggcgcttgaaagctccgggattcagctcgatcagattgaccgtgaacgcctcggcgtgtacgtcggctcgggaatcggcggcatcacgactttgattgataacgttcatactttaaatgaacggggagcgcgaaaagtgagcccaagccttgtccccatgatgatctcaaatgcggccgccgctcaaatcagcatcagattaggcgcgctcggcccctcactttctcccgtcaccgcgtgttccatcggcaatacgtcgatcggggaagcattcaacgccattcggaatgatgacgcagatatcatgtttgccgggggagcggaagcggcgattacgaatttgtcattagccagcttcggcaatgcccacgcgctgtcagcgagaaacgaagaccccgccgctgcaagccgtccgtttgacgcggatcgtgatggatttgtcatgagtgaaggcgcgggcatcttagtattggaatcattggatagcgcaatcggcagaaatgccccgatcctttgtgaggtgctcggctacggtgcgagctctgacgcctatcatatggtggcctcccatccggaaggaacgggcgcatacctggcgatgaaaaacgctttgaaaaaggcgaatgtttcagcggaagacattgatgtcgtaagcgcccatgcgacaagcacaaaagccggagatctttctgaaacattggccatcaagacattattcggggagcttgcgtatgatattccggttacggccaacaaatcaatgctcggccacatgcttggcgcggcaggcggcgttgaagccatcgctctgacagaaagcctgagacacggcatcatcccgccgacgatcaatctgcagcaccctgattcggcatgtgatttggactatgtagcagacgggccccgccagcaatcgttaacgatcggcctttccaactcattcggctttggcgggcataattcggcgatcgtgctgaagacatatgaataacgggcatcaaaaaaaggagtgaatcatttcactccttttttgctttctccggttttgttgttaaggcgaaaaaagcgatggaaccgataacggatgtcgtgaacataattgcccccatcggcacggccgtcgcttcattcatccccacaagcggcgacacgatggaaccgagaagaagcggaagcatgccgagcagtgcgcttgcgcttcccgcgcggtgtccctgcttttccatcgccaatgtaaaggtgcttgtcagcgtcatgccgatcgtaatcatataaatgaaaattgaaatcaccagtgccgccagcggtccgtgaatgatcgtcatgacgagcagaacggcagtcgccgtcatcgctgtaatcacgccgattctcaacaggcttttttcgtgaatgatcccgccgaaacgcccgatgataaagcttccggtaatgatcgccagaccgtttatgccgaataaaacactgaatacctgaggcgatactccgtaaatatcctgatacacgaaaggcgttcctgagacatacgcaaagctcccgccgtgaataaaaccgaccgtcagcgcatagccgataaatgaccgatccttcagcaggcttcccattgtccgcacggaatttccgatggagctcggaatccgcttttccggcggcagggtttctgtcagcttgagcgcaatgatgagaacaagcaaaaacccgataaaagttaaaaacagaaaaatcgtatgccatgatgcaaacggaagcaataaaatcgcgcctcccgtcatcggcgccaccatcggcgcgacggcggtaataaccatcagcagcgagaaaaatttagaaagctctcttcccgtaaacacatctctgacgattgcacgggataaaacgagtcctgccgaagcggtgaatccttgaagaaaacgggcaatcaccagtgttgaaatgttcggtgcaagcgcgcaaaacagagaaaacaaagcaaataaaaaaatacatagcaataacggttttcttcttcccttcgcgtcacttaacgggccgacaacaacctgtccgattgtcagtccgatcagacaagcggttaaactgagctggacaagcgaagcgcgggcgcttaaatcttcggcgatttcagggaagctcggcagatacatatctatattgagcggccccagtatcgcaagcattccgagtagaaaagccagcgcaagccgctccttaccggtcggattatgcagcatatcgttcccacctttcctttgtcaatctctcaaaacatttgtatattgtatcataattttttctttatttttaaaagttttcaaagggcataaaaaaaaccaagggctgtaacagcccttggttccggatcacgcggtaaaaggttttacgcgtgtttttctttaaatgcttttgcgtattgatcagccgctataatggcgtccgccacgtcgtcagccgtcacgtcaaaagcggcatgaatcgtttcttcttcaatcgtcgcggcttctgccactttcataatgtcctctttagatgcgtctttcaatttgatgtcttcaagtgtgacaggcagccctaagctgatataaaacgcgatataccgctcaatttcctcaagcgaacgtttttccagcgccaattgaacaagcgtgccgaatgccactttttcaccatgggtcaagtgatggatttcaccttcaagcgcggtaaatccgttatgaatggcatgtgccgcagctaagccgccgctttcaaatcccagtccgctcagaagtgtattggcttcaaccaccgcttccaatgcgggtgtaacggctttcgctttcacagactcataagcgagacggccgtatttgaataataccgcttcacatttttccgcgatagcctctccggcgattgtcggaattccgcctgccatcgttttaccgccattggcgatgacactgcgcgcctctatccacgtcgccatcgcatcggcaatccctgacgctaaaaagcgcggcggagcttccgcgacgattttcgtatcgaccagaaccaagtcaggattcttatgataaaaacgatagttttcgaacgcaccttgttcagaatacacgacagacagcccgcttgtcggagcatccgttgaagcggccgtcggcacgataacggtgtagccgtttatttcatctgatacggctttggccgtatcaagcgttttaccgccgccgactccgatgacaatagtcgcccctgctttttctgcgatgccggcaattcttttcatttcttcctgggaggcttcgccgttgaaaaccgcttcttcagaagaaatattgcttttctttaattcagccgtcactttatggcccgcgatatcccatacggttttgtccgcgatgacgacggctttttcaccaacgccctccagatgtccgccgattgtttcaatggcgttttttccctgcacgtatttggccggactgataaaaattcgttccaatgtcatcatcccttcttcgttgtctctcattacatttctcttattgatagagcagaaatgaaaactcttctgatatcattcctcgttttgatttgattcaaacctcatatacactgcagaaaaatcaattttcacggcattgacaagatgtgaaggtgtctatataatcttcgatattgaagctgatcattctttactgaatgaacaaacgagattgtgaatgattcgtcttaaaaattatttagttctgctggataatttttgaggcgtttttgttttttatatatttttgactgcggaggaggtttgcatatgaagaacatttgcaaggatatactgatgattatggccggagcctttcttatcgcggcgtccgtggaatttttcgtcatcccgaatcatttaggggacggcagcaccgtgggaatcgctctcgttttatattatcttttccatatacctgcaagtattacgactctggttgtaaatttgatttttatcgggttggcttataaatttttaacgaaaaaaacgattttatacacgatactcggtacgggaatgacttctgtttttctcagcatcgtcagctttattccattcggcgtgcacgacatggtgctcgggatcgtattcggcgctctgctgatgggagcggggctggcattgatctttatcgctgacggatctaccggcgggaccacgcttttggcgtatttattgaattacacaaagggctttaacatctccaaaagcatgttttatatggattgtgtcatcattttcgcatccgttttagcgatcggaatcaatcatatgctgtatacgtttatattcgtttatctgtgcgccaaaatcgtcgatattgtcattgagggtttccataataaaaaagccctcaccattatgtctgaccaatacgaagaaatcgccaaagccatcacctccgagtacggcaacgcggcgacgattttttacggatacgggtattacggcagcaaagacaagcgcattatctatgttgtcattaaaaagaacgaattgctgaaaatcaaaaaacatgttcaaaaaattgatccgaaatcatttatcgttattcatgaagtaaaagaagctgtcggagggcaattcgggtttacaaacctgcccgccgcaaatgaaaaataaccgcctgcagtgtatagctgcaggctttttttattcgtctctgccccgcttaaaggtttttacatctttcaatcgaagtagtaaatgaaaccttttttgatggaggaacataaaaaatgaatatcaaaactgacaggctcgtaattcggacatttgaaccggaagattggcaggatgtctatgcgtacacctcaaattcgaatgtcatgaaatatataccagagggtgcctttaccgaagaagatgccaggaaattcgttactgaaaacagcggtgaacatgccgggaagtttcccgttttattgaaggatgagaaaacggtcattggccacattgctttttttcagtattttggcgatcatacgtatgaaatcggctgggtgtttcacccggaataccagggcaaaggatatgcttcagaggcggcgcgcgccgtgctggcattcgggtttaacaagatgaaattacaccggatcattgcgacatgtcagccggaaaatatggcttcgcaccgggtgatggaaaagatcgggatgagacgggaaggcttttttaaaaaatgcattccccatgataatgaatggtgggacgaatattattatgccgttttagaagaagaatgggaagtctccaatctggaataaaaaggcttataccctttgcttttacagataagtgtgtgctacactgtttgtaacaaatacgaagggatgatgggtggacaatgattaactaatcttattttgaccgtttgaaatcaaatatttcaaatcagaaaaaataggattagtctgcccattttctatacgatacgaaagctatgtaaaaatagcttatttgatcatgcacaggtacggctaatccttccaaatcaattgggaggatttttttggtcctccctttaaagcgagggattgacatatgaaagaaatgttaaaaataagcggcatcagttatgaaatcaacagcgttcccctttttgaacaaatcagcgcgagcgttcagcaaggtgacatcatcggcgttatcggtaaaaacggcgccggcaaatcgttattgctgcaattgatctgcaatcaaaaagcgccgtcacaaggacagatccagatgacgcaagatgtgaacatatatatggtggaacaagaaacagaagcttatgattccggccatccggagcctgcggaggcagccttgttagaaaagtggaacgtacccgcacgcgccttttcgcaattaagcggcggagaaaaaatgaaagcccgtcttgccaaaggtttctcctcctcaagcagccttttgttattagatgagccgacgaaccacctcgatcagcacagtttggaaatactgctaaatcagatcaagaattacaaaggcaccattattttcgtttcgcatgatcgtgcttttatagatgcagcggcgacaaaaatctgggccatcgaaggaaggaaactcattgaacataaagggaattattcaagctatatggaggtccgcaaacagagaagactgacacagcagcgcgaatatgagaatcagcagaatatggtcaaaaggattgaagctcaaatgaacgagctgagcgcctggtcaaaaaaagcccacgcccaatcaacgaaaatagaagggtttaaagaataccatcgcgtaaaagcaaaacgcacggacgcccagattaaatcaaagcagaagcgccttgaaaaagagcttgaaaaagcgaaagcagaaccggttgaagcggagtatgaagtccgtttttccattgagcaccgcaaaaaagcgggaaagcgttttttagaagtaagggatgccgcaaagtcatatgacggacgaacgctttttaaaaacgtgaatttcactgtgatgcacggtgaaaagatcgcgattacaggcccgaacggcagcgggaaaacaacattattgaaggtcatcctcggtcaggaaaaagcgcagggcggcatatggatttctccgtctgcaaacgtcggatatttaacccaggaagtattcgaccttccgcttgataaaacccccgaacagcttttttacaaagaaacgttcgaagcaaggggaaatgttcaatccctcatgaagcatttaggatttaccgcgccgcaatggacggaacccatcggcaagatgagcatgggagagcgggtcaaatgcaaactgatggcgtttattctggaggagaaagatgtgctgattctggatgagccgacaaaccaccttgatctgccgtcacgcgagcagcttgaagacactttggcccgatacgacggaacgctcatcatcgtatctcatgatcgttactttgtcgaaaagacgacggacatccggcttgatatctcaaacggcagcgtccgaaaacaatggaaagaatctccctccgtcagggacgatgctgaagaactgcgattgaagcttgaaaccgaacggcaggaagtcctcggaaaactcagcttcatgactccggctgataaacaatatcgtgagcttgatcaaaaattcaaagagctgacggaagaaataaagaaattgaaatgaatgaaaaacccgtgattgtcacgggttttgttttggaaagctcacgtatcatgaagaataatttcaaactgatttgtacaacctacgttcagattaattatgagcatggttcagggggggcgaagaatggccaaacgcatcggaattacgggaaacattatggctgatcaatccggccctttcccgggttataatcgggcatatgtcaataatgattatattcagtctgtttctgaggccggcggtgtgccgtttatattgccggtgattcaagagacggcgcttttaaaggaacaggtctctcatgttgacggcatcattctgtccggcggccaggatatagacccgctgttttacggcgaagaacctttacaggctttaagaaagacctttcctgatcgggatgcctacgagaaggagctgattctcacggcggttgctttaaaaaagccgattctggctatctgccgggggatgcatatgttaaacgtcacttacgggggaactttatatcaagacctgacacacgcttcgtttgctgacattaagcacgatcaagaaaaagatccgccgttaaaaacccatcatgtttcttttgaaaaagggacacgtctccattccttgtttggcgattcagcgcgggtgaattcattccatcaccagatcataaaagagacggcgccttcgtttaaagccgcggcttatgcgaaagacggggccattgaagcgattgaacggacgggtgaattatttgtcgtcggcgtgcaatggcatcccgaaatgctgacaaaaaagcacgaagacatgaaaaagcttttttccctttttatgaatgcggtcagaacataaaaaaaagcagatcataacgatctgctttttcattttattcttccggtttctccggtgttttgccttgtgtcagcttatggccttcgatatccacgttcggaatgattttatccagccacttcggcaagtaccaggccgcatgtcccatcagcttcatgacactcggaatgatggtcattcttacaatgaacgcatcgaaaagaacaccgaaggtcattgccaatcccatggatttgatcgtagagtcccccgcgaagatgaatccagcaaagacgaaaatcatgatcagtcccgccgctgttacgacaggtccgctatgtttcaatccggcatggatggcttgtaccggattttttgttttgacatattcttctctcattctgctgacaaggaatacttgatagtccatcgccagcccgaaaagaataccgatggctaaaataggcaggaaggcgagaatcggacctttttccggaatgctgagcaagccggtgaaattcccatcctgcagaacgaataccgataacccgagtgtagcggtcatcgtcagcaaaaagccgacgacggcggcaagcggcacgagaagcgagcggaaaacaacggtcagcaatacaaacgcaaacccgacaatgagaatggcgaattccggaatcgcatcatttaaccggtctgaaatatcaatattcaccgctgttgacccggtgacgagcaggcggatgccgtttttgtctgatcgtttccgtatatcctgcactaactctttcgttgccttatcattcggcccggtttcaggcactgccgtaatgatggcataatcccctttttgattcggcatggcaggtgtgacgctcgccacattgtgcaagtcctttatttctttcacggcgtcttgaaatgcttcacttttgttccccttgaccccttttgcatcggcaacaattgtcagcttgccgttaaagccttcgccgaatcctttagacaacagatcataggcgcggcggtccgggctgtctttcgctttcattcccgcatcaggcagccccagctctaaatgcatggccggcagactgatgacggctaaaagaataatgctgaaaatgcttaacagaataggcttctttgtaacgaagcgcccccaggcattcgtgtcggcgcttttcttttctttcttcttgtttgatttcggaatcatccgttttcctgcgattgacaacaccgcaggcaccagcgttactgaagccaatacagccatcagcacactgagtgccgcagtcaatcccatggcagacatgaacggaatgccgacaacagtcaatccgcaaagcgcgacgatcacggttagtcccgcaaaaacgacggcgctgccagccgttcccgcagccttagcgatcgattcatttttttgtacaccttcgcccaaaaactgacgatgcttcgtaaagataaacagcgcataatcaatcccgacggccaggccgatcattccggataatgagagactgaccgaggctattgtaaagacctgtgttccgattaacgtcagcgcgacgcttacgcctaacccaatcagggctgtgacaatcggcagccccgctataactaatgaaccaaacgtaatggccagaacgacgaaagccagcacaacgccgacaatttcagagacaccgccgacttcaacaccggcccccggcacatcaccgctgagctccgtctgcaggcccttgtctccggcggcggacagactgtgtttaatatgtgaaacagacgcctccgtaatgtcatccgccgcttttttgtacgtaatatcggcatatgccactgatccgtctttagaaatggttcctgtctcaaaaggacttgcaatcgaagcgactgaatgatctgttttgatcttctttaatgtctcttcaatcgcttgtttttccggttttgacgtcaatttcttcccgtcttcagctccgaaaataacccgtatgcttcctttatcgggcccctttgaaaattctttttgaatcacatccatcgccttttcagaaggtgtgtcgggaattgacatatcctcagaaaaagcaggttttaacgagatggcgatcacaatcgaagcgatcagtatcacgagccacgcactgatcattttgaatcggttgcgggcagaccatccccctaatttatataaaaaaccagacatcgaatactcctctccaatcattactttctgcctaattgtagttcacattcacataaaaaaaacgtacataggggcatgtacgtttgggcagtttttcattatatattcagtttcagaatgcctttttgcatggcaatggtgacggcttccgtccgcgaatcagcgcctaatttgttataaatcgatgttaatctcgcttttaccgtccgctctgagattcctaaatcgaaggcgatcgctttgcttttatgtcctttcgcaacggcttgcagaactatgatttccttgtccgtcaactgtgtttcattggcatttgcccgttccattttcatttcccggaaacgccgcaagatgtccggctgcagaagcacttctcccctcaccgccgcatccatcgtatgaaataaggtttctgagcttgtgtccttcagcagataaccgttcgcgcctgattcaatgccttctatcatcagatgatcttcattataggtcgtcaaaataatgatcggcacatcagaatgctcttttatctgtttaatggcttccagcccgctcatttccggcatgtacagatccatgagaatgacatcgggctttagttcctctgcgaggcggacggcggttttcccgttttccgcctctcccgttatggtgtaatggtcatttgtttctatcaaaagcttcagaccttctctgacgacaagatggtcatctgctattaacactttatacatgttccgcttctccttgaattggtatgatgatctcaatttgagttcccgctgatctggcgcttgttatacggaaagtgccattcatcatattgacgcgttcttgtatcccaagcagcccgtaatgtccgctttttctcatttctgttccggcatcaaagcctttcccgtcatctttgacggttatgcggatctgtccctcttcttcctgaacggacacccagacattcttggcttctgcatgcttggcggcgtttgtcaggccttctccgatcatgtaatggcaattctccgccgtatgaacgtcaagcacatgatgcacgctgtaatctaaaaaacaagacagcccggaggcttctgtaaaatggttgatttgttcagtgatgctttcttttaagaacccgatctcttctgatttgctgcgaaggttgtcaatggccgagcgcgcatcagccaatgtgcccttcactctgtccattgactggctgatgatgtctttcgccctgtcagtgttaccctttgaaagatgaacatgtaccgcttcaagctgcatatgcaagctgaccagcccttgtgcaagcgtatcgtgcaagtctctcgccatccgctgcctttcattctgaagcgtcagctgtttcacttgccgatgagcgagttctaatttttcaagcgtcatctgtgtttttattttttcatcaacttgcgcgaaaaatgttgccgcatacgtgataatcacgatcatgatgggagcggcgataacgatgaaacgaagcagatgatgcggatgctcctggtgcagggctgctatggacattaaaatgaaaagatagagtatgagcagcgttttgcccttatccgccattccgataatctgcccgattaaaaaggcatagagaccgatgaccgccgcgatatagcccccggtcatcaagttagccgatgtatatatgataaatccctgtatgatgaaataaagaaacgtttttttcttgacccagcgataggaatgccagtgcagcacggcaaaaatgacgatcaatatcgtgaataacagcagcaataaaaccgtccagctttcataaatgtactgcaaagagactgatgcggcatataccataaaaataaacgccagaccgggcacccgaagcgcaagcatatgcaatgagcgtctgtcacgggagacatagtcttcttgatgttttgtaccaaacaatctctgtccacttccttttagccgaccggcctcacgatgttttattctatttgtcatcataccataagtgcctgcttctcaccttccccttctgtcctgcatgacgggtgaaagaaaaaacagcctgcgggattggttatatatgggcttgcgttcggctcattgatcggcctgttaagcgccagccggatgatctcgcggaagggaaccaggttcgttgccccggtcagcgttctgtttgttatcactgggatatttgtcatcagcgcaggttgtttttccgctttcaaaagcatcgtgtttgccggacttatcatcttcgggattaggcttcctctttttttgatgtaccgtcagatttcttctctcttttttcttataaacaaaatttgtaagactagagctcttttctcaggggaaattaattatgtaattgagaagaggaggtttaagacgattatggaaaagcgtgaattagcggctcacgagtcgcttgacttacatgaaatgattaacttcaagacgctttgtgtagcgaaatccaagctcatgcaagggcttgtgtttgatcaggatctgaaaacgttaatggagaaagatgttcagcaagcctcgcaagacctggctgatctgcaggcggtttatgaacgggcatcttttcaggctcctgttcctcaaaaccggccgacttcgatcatcaattgaaaggaaggtaagcatcgttgaatcatgaccatttagatccaatcaattcattacacgtccctgaactcgcagatatgacattcgcaatggattttctcataagggcaaaagaaggcgtcagaaataccgccgtcgctttgacagaaaccgcttcacctgatgtaagagctttgctgcgcaaacagctcatgcagggaatcgcgatgcatcaggaaattacagacttgatggtcagcaaaaagtggtttcacccgcatgatctgagcgaacagtataaactggaccagctctctgcgaaaaataccctcatggtcggaaacatgaatctgtttcccgttgaaacgaacagaaaagggatgtttgaccgcacacctgatgaacactaacactggaggtattacagcatgaaggccgtaacgtatcaaggagtgaaaaacgtcgtagtcaaagacgtgcctgatccgaagattgaaaaacacgatgacatgattataaaagtcacaagtacggcaatttgcggatcagatttacatttaatccacggactcatcccgaacttgcaggaagactacatcatcgggcatgaaccgatgggcatcgtggaagaaaccggtcccggcgtgacgaaagtcaaaaaaggcgaccgcgtcattattccttttaatatcgcctgcggagaatgcacttattgtaaaaatcacttggaaagccaatgtgatcaatcaaatgaaaacggcgatatgggcgcttatttcggctattcagggagtaccggcggctatcctggcggccaggccgaatatttgcgcgtcccttttgcgaactttacccattttaaagtccccgaaacatgcgaagaaccggatgagaaattgagtgttattgccgatgcgatgacaaccggtttttggagcgttgacaatgccggcgtaaaagcaggcgatacggtcatcgttctcggctgcgggcccgtgggccttttcgctcaaaaattctgctggttaaagggagcgaaacgcgtaatagccgtagactatgttaactaccgtctccagcatgcgaaacggacgaataaagtggaaatcgtgaacttcgaagaccacgaaaatacgggcagctacctgaaggaaatcaccaaaggcggcgccgacgttgtcattgacgccgtcggcatggacggaaaaatgacagatcttgagttcctcgccagcggattaaaacttcaaggcggggcgatgagcgcattggtcatcgcgtcccaagccgtgcgaaaaggcggaacgatccagattacgggtgtgtacggcggcagatacaacgggtttccccttggcgatatcatgcagcgaaacgtcaatatccgatccggacaagctccggttatccattatatgccgtatatgtttgaactggtgtcaaccggcaaaattgatccgggcgatgttgtaagccatgtcattccgcttagtgaagcgaagcacggctatgagatgtttgacacgaaaacagatgattgtattaaagttgtactcaaaccttagagaacggaggctacagaaatggccagcgccttacatgaattactcgaaattcaggagatggcttcttttaagtcactttgcctgacgaaatccaaaaccatgaaagcgctcgtatccgatccgcagctgaaagaaatcatgcagcaggatgcggatacatcaacaaggcaattgcaggaatttgcctcgattttatctgaggcaaagcatgaataggagatgaatgacgaatgaatccgattattgaatacttgacggggatggatgcactgacagaccaagttgtcgcaatggatttattgaattcggctaaaagcggagtcagaaactatgcgatggcggcgacggaagccggaacgcctgaagtgaaagcgatcctcacccgtcacttagaagaagccatcgacatgcatgagcaaatctcacgctatatgatagaaaaaggctggtatcatccgtggaacacagatgaacaagtccggtttaatttacaaaatattgatacggcgctccgcctgcccgtcctataaatcgttttgctgctgagacagcacccctgactcaagcttcagtatttcaaactgtgagctgccttttacagcgcccaggcggctctcagtttttttatgccttcttgtatatcggtttcagaaacccccgcgaaaccgagagaaactgttttttcagggacctgtttttgataggtaagagacacgggatagattttgacgccttgttcctccgccttttcaatcagctctttttcgctgaaaggcagatgaacgtcaagtaaaatccgcagcccggaattttctccgcgaatcctgacgtattgtcccagctcgcgccgcacggcctctaataataccgctctttttttccggtacagctttctcattctgttaatatgtttctgccactctccgcttttgataaattgagccagcgtcagctgactgtggcaggagacggtctgcttatataaagaagcgatttccctgcctttttcgataagcggcaaaggaagaatcatatagctgatgcgcagcgaaggaagcagagattgggaaaacgttcccatataaataacacggtgatgctgatcaagcccttgcaatgatgggatcggctggccggtgtatcggaattcaccgtcataatcatcttctataatgaacgattgatgttccttcgcccatttcagcagctgaatccttctgtttaccggcataatcattcctaacgtaaattgatgagaaggcgtgacatatacaagacgcggccgctcttcattcagcttccggatacagactccttcattatcgacgggtatcggaatgatcttcatgtgattggctttaaaaatctccctcgctctcggataacccggatcttcatatccgatggatagatttgcttcaaatattttgcacagcatttgcaaaagagcagggttcccggcgccgactatcacttgttcaggaagacaattcacgccgcgcgactgatataagtactccgaaatgagcgttctcagttcaagctcgcccaaatcatccccgggccgatacagctcatgcccgtattgatctaagcttgcaaccatacttttgcgccatgccgaaaacggaaaatgagcggcatccacagtgccgtagtgaaaatcaatccattggcggtcttccttcgcctttgtttgaacaggcgaagcgcccggctttttcacatagacggcgtccgagtcataatcggcaaaccatccgcttctcggcttactgacaatatagccttcggcggcaagctgttcataggcacgctccacagtcgtctgactgacggaaagctgacttgacaaaagcctttttgaaggaagcttcagtcctttaggaatacggccctgatgcatattttccttaaaatgccgataaagctgctgataaagcggaatatccagatctctatttaaaaatggcgtgatatccatttttactccctccaaactggcattcttctttttataaaaactggccatttgtatatggccaatttcagtttatagtcattataaactttgaaaatgggtttagaaatatatattggagtgattggaatgaataaggccgcaaacggctggattaacggatttatcggcgtgctcattttcagcggctcgcttcccgcgacccgcttggctgtagcggactttgatccggtatttctcaccgtatgccgcgccgcgatagccggtatattggcaggcgctctgctcctcatttttcgggagaaacgccctgccaaaagcgacatcatttcactactaacagtagcgctcggcgtcgtgatcggtttcccgctgcttacagcattagcgcttcagcatgtcacatccgctcatgccattgtctacatcgggcttctcccgcttgcgacagcgatcttcggcgtactgcgaggaggcgaacggcccaggccggtcttttggattttctcggctgccggcagcatcctcgtagccggatatgctctgctgcaaggaggggaatcctctccgctcggtgatacatacatgatcgcttcgattatcgtgtgcggtctcggttatgccgaaggcgcccgcctctcccggcggcttggcaactggcaggtgatctcttgggctctcgttttatcgcttccccttatgttcatcctgtctttctgcttcatgccggactcatggtcaaacatcggcgcgcccgcactgctcagtcttgcatatgtctcaatattcagcatgctgatcggcttcgtattctggtatcgcggactcgcccagggaggcatcgccgcggtcggacagctgcagcttctgcagcctttcttcggactgttactggccgccatgattctccatgaaaaagcaggatgggaacttgcggcggtgaatgccggcgttatcgcttgcgtggcggccgcccggcggttcgcaaatcaatcagaaaaggccgaacaatgaacttgttcggctttttcattatattccgcccataggcagcagaagtctgtatctctttcacatgatccggctatttttcaggcaggctgaactcccttaaacgcactcatcaccagatcatgcacataggaatcattcacctcatcacctgtaataagcagacgatagaaaatcggtccgtaaatgagatcgatgcttacgtcaatatcaagattctctcttaattcacctttttgaattcccttttccagaaggcctttcgcttggaggcggcggggcttgaaaaatcgcgtgcgatattcttccgccaattttgcatccagctgccccgcaccgattaattccttaataacggttccttcccggctcgtcaaaaaccttgctaaattcgtggcgtgggtcaatatatcttgcactgttaatcctgtatcgggcacaggcagtctgtccgtagcggtcgaaagaaagctgtccatgataacggcagccttgtttgaccaccatttataaatcgttgccttacttactttggcacgctcagcaattttatcgactgtcaccgcgtcaaagccattttccaacaataggtcatacgctgcagaaagaatcgccttatgtgttccttcatcgcgcggccgtcctcgtttactctgcacatgaatcattccttcccgaattataaacgatacgttcagtatacttaacctttttaaaaaaagaaaacagaaacctatttacaaaactgaacgtttagtatattattttcttataaaaaaactaaacgtttagtttacaaaataacttgagggaaatcttgatgaaacatagactccaaaagcctctgcgtaaaggagatgaatcagcaaatcatttatcaagcatcataaaaaccacttaaaaaggagttcattcatatggctaaagaaaacaaacagacagcagatcagggaatttcagctggtttaacccttctactcgcaactgcatgcggaatcattgtcgctaatctttattatgcacagcccttggcaggaatcattagtgcggcaatcgggctttctccaagcagcgccggattgattgtcacactgactcaaatcggatacgttgccggcttactgtttctcgtccctttgggagacattatcgaaaacaaaaaacttgtcgttgtatcgctccttctaagcgcagccgctttgacactgacagcatttgcgaagcatggaacactgtttttagccgctgcgtttttcatcggactgggatccatcgcagcccaagtgctagttccgttcgcatcataccttgcaccggacgccgcacgcggccgggttgtcggcaatgtgatgagcggcctgctgctcggtattatgctttcccgtccgatatccagtctggtcgctgatatatgggggtggaatgccatatttgctttatccgccgcgttaagtgttgttctggcaatcgtcttatcaaaagtgcttcctgccagaaaaccaacagcaaacacaacctacaccgtcttactcggttcaatgtggaagctgctgcgcacgactccggtcttacgccgccgtgccatttatcatgcgtttgtatttggagctttcagcttgttctggacgactgtgcctttattattgtccggtcctgcttttcatttttctcaaaaggcaatcgcgctgtatgcattagcggggattgcaggtgcagcggctgcaccgataggcggccgtctggctgatcgcggcttgacccggcttgccaccggaatcgctcttggtgttgtcatcgtttctttattactcccgctcatgattcagagcagctcccccgtcggcatagcagttctggtggccgcagctatcctgttggatatgggtgtatctgccaatctggtactcagtcagcgtgctattttttcgttggcacctgaatttcgcagccgattaaacggattatttatggccatcttctttctgggcggcgctgtaggatcatcaatcggaggatgggcatacgcctcaggcgggtggagtatcacattatggattggaatcgcttttccggtcatcgcattgctttatttcaccacggagaaataagccattcaccaaaaataagccgtcagaaccaagctgacagctttttttgatgtattcttctttacatccatccgaacaaaaaatccggattcataaaaagatgatattgattctttacgccccgctcacatagcagaaacggtaaaaccatgtcataatatgttaagaaataattacgccataggcaggtgaaacacatgaagaagtatttatataaacaccttttgttagctctcgtttcgtccgtttgctatttattggtcttttatgtgggtttaaaattgacacaggaagacacaccgccgttgtcttcttacccgttttacctttttatttatctgtacatagcagccggatatttgacggtcggccttgttttagcttgtatgactgatatcttgaagaaccgctggacattcaataaaccgtctaccattctattgaaacttatcgtttacttactcataccgtatgctatttttcattctttcttcattttaatggcgccattgatttatgtgctgtttgagtcgttattcatcctgagaaaagcttcataacctgcgcatgctgccggtatgtttttaacatgcttgtcagttgttcgcagtgattcgtttgatgttttcttccatcaagccggaaatgagctgttcgtttgtatgaggaatctgtttgagctgttgtacgaccagcccttgtcttgcggctgaatgattttgactcagctttgctttcccctctattttgctgattttgattttaaaaccttttacccctttgttcatgcctgccagcaatttcgcatcgacatcctctaatttgtacgggctgtcggggctttcgtatttcaatacgagatcactcatcgattgcacggtttcttcctcatccaaaagctccgcctctccgtatacatgaaccgccacataattccatgtgggaacagcctgattcgtctcataccatttaggcgagatataacaatgaggcccttgaaaaacggctaacacgttttggccatcaatctctttccattgggggttcggcaatgcaaaatgaccgtataagcattcgttattcttactcatcatcaatggcaggtgggttgcatacggcatgccttccgccgttgaaaacaatgctgcgaaaccatactttttgattacatcgcacgcttcagcttcactcagctgaaatggagccggaatatacatacaaaactctcctctctgaacatggattgataaagcgctttccgctataataagatatcaactgacatttaaaaagatacagtttcaaacaaatacacatgtcagaggagaacatctgatgaaaaatatgattttcgctttcgaaagcggcaccccgaaatacaaacaaatttacgagcaatttaaaacattgattgagcagggaaatattcaggcagatgagcggctgccttccattcgcgagctggcggattccctgcgggtaagccgtaatacaacgctgatggcttatgatcttcttttagcggagggatacattcgcggagaaacacgcaaaggttattttgtaaatgaagtagaaccttctatatttcaaaaagaaaacgatgttgtttacgctgaaaaaaccgaatcaactcagccggtcctgactgatttttgcgccggagccgtcgatcaaaagcattttcctctgaaaacatggagaaaattatacaatcaagttttgacatcagagaaaagctttctgtacggcgaaccgttcggcgagagaggcctgcgtgaacaaattgccgcttatctcttggaatcccgcggggtgaaaacagatgcggattccattatcatcggcagcagcacccagcagatgctgatatatctcagccggattctgaaagaggatttttcgggaatgatcgttgaaaacccgggatttgacggtgccagagcggcatttcaatttcacgggctatctctggaaacgatgcctgtctatgaaaacggagctgatttttctcaattacatgcaatgaaagaaaaattaatctatgtgaccccatcccatcacagcccttacggcgtaagcatgtccattcagcagcgccaaactctgatcaattgggtgaatcatagagagggttatattctagaggatgattatgacagtgaattccgttatacacagcagccgtttcccgctcttgcttccattcaatcagaccgggtgatttatttagggaatttctcaaaatcctttcttccgggcatccgcataagctatatggttttgccgcagcgccttttgcgccggtataaagaacggtttattcatttcgaaggcaccgcttcttcgcttaaccagctgaccatggctgaattgatgaaggccggtgaatggacccgccatattaagcgcatgcgcattgtttacaggcgaaaaatgcagcacttgatttcacatgtaaagcagcagttcggcgatcatgtgacgatcatcggcgagcagtcgggattgtatatattggtgagagttcacctgaactatacagaagaaacattaatcgaacgcgcttttcagtacggagtgaaggtatatcctaccgccgtttatttcgttgccgaaaaacccgaaccgccgatcataaagctgggtttcgcccatctcgatacggatcagatcacacatggcgtacagcttttgagaaatgcttggctgtcatgaaagaaaaaaggcgccgaacggcgcctttttttatttcgtatttcttgtgaatttcggcagtccaaatatgatggcggcgatgccgcagattccgattaaaacgggatagaaagagtatggcaggatgctgacgggtgaaatattcccgaatttcccggctgataacagctgcgcgccgtaaggaatcaatccttgaatcatgcacgaaaagatatccagaatacttgccgattttctgttgtcgatgttgaatttatcagcgatattctttgcaatcggcccggctgcgataatcgagatcgtattattggccgcagccagattcgtcacgctgaccagtccggcaatgccggcttcggcgccttttttcgaacggattcgtttcgtgatgaactccagtaaaaagtcgatcccgccgttttgtttcatcacgccgaccatcccgccgatcagcatggacaggatgatcagatcgctcattccggcaattccctccgtaatcgccttaaaataagaatcaaacgtaaggctgccgcacgctaaccctatgattcccgtcaaaatcaatccgccgaatatgacagccatcacattaataccgattaacgcaaaaaccaacacggcgatataaggaagcaccttaatccagctgtaagatgcagttcccgtatggacggcgtggcctgccggaataaaaaataagataataacagtcacaatggcagcgggcaaaacaatcagaaagttcgttttgaatttatccctcatttgtgttttttgcgtccggactgccgcgatggtcgtatcggaaataaaagaaagattatctccgaacatagctccgccgaccacagccgcaatcggaatcgcggcggagatgccaagctcgccgctcaaacccgcgctgatcggcgcaaccgccgcaatcgtgcccattgatgttcccatcgatatagaaataaaacaagcaatgataaacagccccggcagcaaaaactgctgcggaataacgctcaaagcaagattgacagttgaatgcaccgctcccatcgcttcagccgctgaagcaaaggcacctgccaatataaaaatcataaccataatgataatatcaggatgtcccgcaccggaagcgaaccattctattttttgattgagcgatttcttccggttaaataacagcgcaaaagctgacgcaatgatcgcggcaatcaagatcggcaatttataaaaatctccggtcaccagaccagagccgacaaaaagccctacgaataagactaaaggcaataacgcccaagggttctttttattgttcatctgggtaaaccacctcttttcagcattaaagtcgctaatcacagtctaagcaacatttcacactttaaaagtctgcagtaaaaaagtcaagctgaaaaaaggataagtaatgattgataagatagaaaaggctgttttgtttccactctttagaaaataaaaaaaccaaggctcgtttcccttggtacatttcatgcggccccgcgtccgggacaccttctcttcattcagaaatacattcagctttcaatctgtttttaagtttcgcttcattttcaaggatatcttcgtaatcctcaatcttcctgtttaatcgttttatggtttcatcaatttccctctgtttctccgtcagccttttcctttcatttataaggatgttttttcggggttcgattgtatgatcggctccttcaataaataaagcggtatattcaatcagcgcctcaatcgacagcccggcacttctcatgcattttataaattgaatccaattcacatcatcttcgtcataatcgcggatgccgctttcatcgcgttttaccggaggaatcagtcctatactttcataatacctaagcgttgcggctgataactcaacctgctttgcagcctgcgcaatcttcatatttttaccacccgtccttcatacctttcataagcgtgccattatagaatatcatttcataaaaaaataaaccaaactccttgacttaaagtccgctttaacatttaaagtaaaatcgaacagaggattcatcactttatcttggaaaggaagataaccatgtgcaataatcatccgactcgtgtattaagcgctccgcatgcaaaagctaaatttgagcggacaacgattgagagaagagcattacggccgcacgatatcctgattgatattaagtacagcgggatttgtcactcagacatccacagtgcattcgatgaatggggcggcggaatctttccgatggttcccggacacgaaattgccggagttgtggaagccgtgggtgaagaagtcaccacatttgccgtcggcgaccgtgtgggtgtcggctgttttgtagactcctgcggggaatgtgaatactgcctgaacggagacgaacaatattgcacaaaaggcgttgttcagacttataataacctggactacgacggaaaccctacgtacggcggctacagccagaaaatagttgtcactgacagattcgttgtccggattccggatcagctggatttggatgctgccagcccgctattgtgcgcgggcattaccacctattctccgctgaaacactggaatgccggccccggcaaaaaagtggcgattgtcggaatgggcgggcttggacatttagccgttcaattcgcgcacgctttaggcgcagaggtcaccgtcctcagccgctcaatgaacaaaaaagacgaagcgcttgaatttggagccgatcattactttgcaacaagcgatccggatacatttactgagctggccggacgatttgatcttattttaaatacagtatccgcgaaccttgacgtagatgcctacttatccctgcttcgcattgacggtacattggtaaatgtgggagcgcccgctaagccggactcatacagtgtgttctccttaatcacgggccgccgcagcattgcgggttcactcgtcggcggtattccgcagactcaggaaatgcttgatttcgccgccgagcacggcattgctcctaaaattgaagtgataccggccaatcaagttgacgaagcgtacgaacgggttctccaaagcgatgtccgctaccgtttcgtcattgatatttcaactttataatcgacataaaaaacataccaatatttgttggtatgtttttttcagttcaaattattttttatttcagcagccaaccgggcaccgcttttatataaaccaattcgcctatcaattcaacaatcgtctgtgtgacgattacagcggcggctaatgaggcccaagcatccggcaaagccagcgctaacggaaggactgcgagagaatttcttgtgcccgtgctgaagatcaatgctcttccttcacctgtatccagacggaacgcatatgcgataagccgggagacaaacggcataatgagcaggaataacagatagatcggaatcacacgtataatgatttcagcatcactgatgacctttccgatttgtgtggcgacgaccgccagtaagaccagagccataaaaggaacaggcagccacgccgtccattccaacaccttttctcccgccggcttcttatcagcccataattgagtcatcaccgccgccagcagcggcactgctattaacaataagaatgcttccagaaacggtcccgcatgaacagcccctatcacttctttcccgataaacagccacaggtataacggaagcaataccatctgaacggcgaacaaaaccggcgtggaagccagtattaatctctcatttcctttgccgagctgagtaaagacgatgacgtaatcaatacaaggtgtaagcaataccaaacaaacccctaataatataggaggagattgaggaaaaatggcggttaacacccatacaacgacaggtacagctaagaaattaccgatcaataaagccgccataaacttgaggtttgacatggcttccttcagcttcaagaatgggatttgggcaaacatggcatacatgagaacagcgataagcggtgatatcgtccatccccagcgaagtcctgaatctttcccggcgatccccgctattccgccgattacaagagtcacaccatatatccaaatttgctgattttctaatgtctctctggttattttcattggctgacacctcttctccgcccattataccttcttttctgccgctcttgcattatggttctgccggaattaaaaaacaccaagggtctgtgacacttggtgttttttggaacgcggccgagaaaaacgggttgaaaaccgttaatcgtttgtaaataacccccaaaaagtatttttgacatactgttccttatcgaataaaagcattctctttcatttccaaagcatcatccagccatctcgggtgcatcggcaagagatgttcaggtaattcatggatatcaaaatatctgatttccatggcttcctcagtggactttttcaaagtgccgccgatgacgtcacattgaaaacaattggtaataaaatggctgactctgccgtcagggtatataaaggtttgtgaactcggatcagaataaacgcctatcattttagagactttcaccactaatccagtttcctcttctatttctcttataattgcttgttcaactgtttcaccaggttccacatgtcctgaaggaatgccccataaaccattatcagcacgcttcattaataaaacggaacttgattctttaattataattccagcgactccggctttcacttgttctgtccattggaaatccggttttttccgtacttctgcctttatttcattatcgaacaagtctttcagatcgcggatcacaacatccggatttctaaaatcatgttttgcaggaaataaagtattttgttcagaaactaatacggaagtgatgcctatttggtttgctccgacaatatctgtttcaggcgtatccccaatcataacgcatctctctttatcttcaaaagactcgagtactttttcaaatattgaagacgccggttttccaattataatcggctctttagcagctgctgttttaacagccgcgactatagcgcctgtcgcgggagctggtccgttagtggcaggaaatgttttatccccgtttgcagcgataaatgaagccccgcagcggatgaggtttactgccttatgcacatcctgaaatgtaatattttgatcccagccaatgacaacagcctccgcctgatcttccgtaagatcaataccggccttttgaatttcacttttaagttggtcatttcccaatatatatgccttctttattccttcactgacaaggtaatcagctgttgcccaccccgcagtaaacacttcatcaatacttgctgaaatccccagtttatgaaggcgtttcacaatcgtttctcttgtaacacaaggatcattcgttaaaaagcgaatggctttcttttcttcacggagtcgttttaaagaggccacagctcctggtaaagctttatctcctatatatatcactccgtctaaatcaaataaaaatacatcataattctcggagatcatcataacactccttaagcggttgtctcttggttaatagttgagcgatacgcaaaatgatttgtagggccttgtcctttcccgattcctaagggatgtttaatggctgctgaaatgaattcctttccagttgccactgattccggtatgctgtgctgctttgccagctctgcagttatcacagctgaaaacgtacagcctgttccatgagtatgctttgtgtcaaagcggggagaaacaaattcctcgaagtcctcgtcaaagtacaaaatatcacgggcttctccgttcaggtgccccccttttacgacagcactttttgccccgtatacctccactatttctttcgccgcatcacgcatctgctgtacagtctcgattgatttgccgatgattacttccgcttccggaatgttcggtgtaataacagttgtttggggtattaataatttcttcaaatgattaatggcgtccttatggagcagatgatgtccgcttttagcaatcataaccggatccatcacatacgattgaatatttgcgtcttttaacttttctgccagcaattcaataattcctatacttgcaagcataccggttttgacagcatccggttttatatcatccatgacacagtctatttgctgagatatattctgaagagagatctcctcaaaacttttcacaccaagtgtgttttgtgcaacaactgatgtaataactgccattccatataccttttgttcctgaaatgtttttaaatccgcgtgaattcccgcccctccggaaggatcagtcccagcaatcgaaagcgctttataagtatccgtcaatttacactcctccttcaggcaggtttcactgctttaaaaatgacaaaaggcggatattccttttcacatttccaattattaaattgaaactctttctctatggcttttacatgctcttggtcaatatcgtttaacgttggttctgataaagttacattttcaaaacctgcaagagttaatagtttataatacattgacttcggccaatgaaaatcatttaaaattaaatctgcttgtccgggaacatggagccattcatttctttcttctccgtaagaatattctttccccggtattccattacggaaggttgaaaattcaattccggttgaatcaggattcgtatcgagtatgacaaatgaagctcctggttttaacacacgaaaaatttcatctatgatacctttgatacgctggtcactatccgtattaataaaaacataacaggccattgcagcatcaactgagtgatctggtaagaaggaaagattatcgtgttcaattaaatgatagtccacatgaggatgttgtctttttgcctttgctatatctaacatcttccttgattcatcgactgcgatcacattgcagcctattctgtcagccagcctataagctacctttcctggaccgcatccgaaatcgagcacctttttaatctccgctttatcaaaagtacgaaaaacaaactcaaaacctaacgtttgttctaaaacgtcgttataagcatcgaatttaccagcaacactgtcttctttccatgaagttttcattgaatttcctccttttgctcagttgagaaataatgaagccacttattcctgacgaaaaattgatatacaggaagtaaactttgaaatagagaatgatccatatcacgtttatatgcaatatgctggtatatactgaaaaggaaaagaatctgtttccagtaatcaggtaaatcaagcatttcaatatcgtttttagtcatagaaatttgatctttcctaagtaattcttcgtactttaagactgtttcaatggacggccagttatttccctcaggcattttcgggaattcaaattccggaatatcatggtgattttcagcttcttcaagcaccgttttcgcccattcatgatctgaatcataaatatggattgatcccgcattatgaaaatattctccgacttctacacgcagttctctggccattaattcctgcatgaaggtaaatgagaaaagatcactgatcatcccgcgaaaagcatcatttgcacgcatgacagaagacatgtataattcgccttccctcacaaaaaactgcaaaccgattgtgcaggaaacatctatattttctaaaacgaagagttccgaagcatcgaatatttgaataaatgccctttttgaatcaatatcttcttgtgtcaaaagattttttattctattccattgatttagttttgcatttccgaattcaaatattttaggcccgtacgcagtgcctgttaatgtttttttattcattgaatatgaaggcatttttttattgtaataactgataaaatctaagtcgttactccccgataaataccatagcacttcagcaaaattaaacacgatattggtttttcttgaggataaataagtaacacgttctattggattttccaaagtcagatggtagttcaattgttctctgcttttttgtccgcgcggtgaattgaaaaattcagggttgtgatagatgtcatacagcgtttccgtatatgcttcatgaaaagttctctttctcattgagattccgccttatatgctgcaaaggtatttttaatgttctctattaaatcatctgtatctttatagctgatgtactcaacatccgccactgcatgtaacccttgaattaagaaagcataatccttgtccttttctagaaatagcacgatcttttttttcaaggcggaagcccatccaatttctatatgtgttccaggagaagcgggtgatccgggaaatgctgcaaaaaggtcgcaagtacttatttcatcaaaatcaattttagtgcattgaaggggtgtcatgaaatctttcccccacccttcccgcttgtgagcattatgaaccagccatccttcattctcaaaaaaggaaattaatgattccagctttcccctctcatacgtactcatcaatccagttttctcatctactaaacttttaaaaggccctgccagaaaaacttttttagtcgccacttcatatcaccctttcaaaataaataaagccactttcctctatggaaagtggcttaaatatagataagataaagaatctctctaatttttcacttccctacgctggtattaaccaaatcaggttcaaagggtcaggacgtattgtctcttctcagctattaaagctcccctagtgactttttataaatatttactttaattctatgctattccatataaatagtcaaacaatgactttcccttcaaatattgcagcttacccactagttttaaaaccttccggcctcttttttcctgccaacgaataaggtcacggcaacactcgctgaactgaccaaagtccccagtacggcagcaagaattgtcaaaaagccattgggaatcagaaatccaatcggaatgaggcccgcaaacgtgaggacgataaaacattgatagactccggatatgattctcacaaccaaactgccaaaaaaggacatgacgaatggcggaatgaacaaacataagatgattccgagtgagatcaataaaatcataggctcgtcaaaagaaatgacacgatcgccgggagactcttcagcagccgcgaatacagcaaatatagacatcatcagcgtaagaaaaacaagaaaaaacctttttagcaacgttatgactcctttttttataaaaacgggtatctttttttcaatcacaataaccattttatgttatcaaatgaaataatatgaagtcaaaccgagttctgcacctgatttattggttcttatttttttgataatttccatataattgtccgcaagcagcatctatatcaatgccaaattgacttctgacggtcacgttaattcctgctgactttaattttttatagaaatttacaacttgtttctcatttacttcttcaaatctcataggtgaactaacagtcgggttatatctaatgatgtttacatggaacaagttccctctcttatatctgcttcttaaaagatttactacttcattcgcatgatcaatagaatcattaactcccggcagcataatataagcaatataaacttttcttgaggtcacacgtatatgctcatctaatgtgtccattacctccaataacgggtagcgttcattaatcggcattaacttgcttcgctgttcattaaaaggagaatgtaatgaaaacgtcaggttgacctgcggataatcctgagtgatttttttaatgcccggaataatacctatggtcgaaatagataacctgcgagggcttaaagcaaacaactccggatttgtaagcacatgtaaagcatcaaaaacttgtacattcgctaatgcttctcccattcccataaaagaaatactgtcaattgaatgtccttttaagtgaaagtacaaaatttggtcagtcatttcatctgacgttaaattgcgttttaaaccaatatctcctgttgcacaaaatgtacagccaaaatgacagccgcactgcgaggatatacaaaatgactcccaaccggctttatatttcatattaaccgtttctattttttcgtctcctgaaatttcaaataagacttttgtaacttgctcagaatgctgcacttttaaaggagcaatatttataattgactctccgaactcctctattaacaattttctcaaggatttaggaagaaccgttatttcattgaaatgatttattctcccttggaatacagcatttttgatttgattcattctaaaatcaggaaatttattttgcttcaggaactcttggattcttatatacttgtttttttgttgcatgttttctcatccttccataatactcttgtttgtttgagtaaatagaagggagttatcaatctaacctttttttaaaatcaggcacaaaaaaacaccgacacaattatcggtgttacgcttaaataacatcatgcacaaataaacaaggacattatgtcattggattatcgtttatttgacatagagaaaaagcaccgataactgtttttgtatggtgatttggcttaaaaaaggacagactgctccctttgtccgccaagatgtttccaatttttgcatttttaccatacaaaattccataaatcgttatcatcgctttcacctctttcttgtcaatattagcaataatcaccatatcataaggtttcccttatgtaaagctaaacaaatgcttacgcccccgctaatgacagtattatacaacttgcttattaagcctaatccaagtacagaaagcgcgctgatcacatttttcacttatccgcgacggaacatttcttatataatgggtgaccggcagctgcctgctggaatcccaatcttcttatagtgattttttatattcatgacagtatgatgatttgtcacttcatcaatcagatcgtttattcgatccagattgatcggtttattttctgataagctgctgaagctttctctgatttcttcaggatagacatttccggccatgcttgacaggccgttacacccgttactcagcatcttcggaaattcaacgtctcctgccgcaaacaaaataaagtgatcagggaactctgtttgtttatgacgcagaacgtctcctccttctttcagcccccttatcccgggatgccggcttattaagtctttaagcgctttctcactcagattaaaaccggtccggccggggttattataaagcacagcctctttagaggtatgactgagaagttcgtcaacgtaataaacggcttgctgctgtgtcggtcttatataaggaggaaaaccaatcaatacagaatcaatattggttttctcgatgtgtttcatcagtttgacggcatcactggttcttacggctgaaacaccgaacatcagttcaacatcttcaaattttcgctgattaacatactcaatgatctgaagacgctcatctatgctgagtgaatgctgttcaccagtcgtgccgcatatgagtaacgaatggataccgctgtttttcaaatgttcgacaatagcatcaaatccttctaaatataaacgttcatcttcatgaaaaggcgtagggatagcaacattaaaattttgcatgagaatgtcctccaagtacatattcttgaatatctgcagagtatcatataacactgtctgacatttaaaaaggtacagtttcagataactcaacatgtcagatgtaaaggccgacacacaaaaaaaagcaggcaaagagagcctgcttcatagcttcgtcttacagcggcccattccctggatggcttgacaaatatgagtaataaggcaaactgaatataaaaattatgctgaggtggggttaatgattttagatttaaaaggtgaaccgcacatggatcatcttgtgggaatgctgtattctgccgttaatgaaaattacagccgcttaatatccattgtgtcagacatgtcacagcaggagattgattataaaggaccaaatcaaacatacaatagtacagctcagctaataagacacttagcatatgttgatctcaactggatattcagaataaagggtgaaccaataccaaagcagcttgaagagaagtatggaccaatgttagatcagaacaataagatccctttcatttccggtgtttcattaaaacaaattctcactgattatgaagaagtattcagcatgtttaagtctgtttgttatcagttaactgacgagcagctgaatcatacagtagattatgaatcagaaaaacaagcaaccattcaatggggaatatggcatatggcagaccataatagatatcatcaagctcatattcatcagcttcgcaaatggtatgaagagaaacagaaacttggcagttaaagccgcttattaggatgagcaaggataaattcattacaaatgtctattttcactgactgccaatcaattaaaatggtcagacaaaaaaccacatctgctgttgaaaagttgtggaataaagcatcgcatcaactgcactatgacaagctgaaacgttaatattttgtgtttcagccattcaatcgctttatttcatcatgctgtccaaatacgattttttcctatagtctttgcagcagtaaagtcctctggaatcctatactaatcttccgcagccgctgcatcggcctttgtcacatgaaccgtaccaaacggatggttaggaggagcataaattgaatacagttttaacggcgtattacccgtattcacaacattgtgccaagtgccggcagggacaacaatggcaaagtcatcatagacatttctttggaaagttaaatgttccttgctcttacccattttaacgatcccccggccttgctcaatccgtaagaattgatctacgtgaggatggatctccaaaccgatatcttctccaataccaagactcatcaaagtaatttgaaaatgctttcctgtccataaggccgtacggaacgtattgttttgttttgcggctttattgatattcacgacaaatggttttggtccataatctttcaagagaaggtttctatcttcgtatgaaggatcatagttatttggaaaagtccaataaacagatcttccatcactatacatcggtacattcacacaataataacattgatgcgaaaaaggtatataatacatttgtcatccccgcaattttaaatttttgtgatattaccctatgctttttgtaatgagagtgtgccgtactaagaaattcccttgttcagcctaaaagacttaagttagcggaaacgttttggccacaaaatccgtttgcataaaaaataccaactgaatatgcgcggactaaaatcgttgcactgatggataatttaggcacatgcccttatcaaaaacaatctgggtgcatatcctgctcctaaaagtcattcataaagggagtttagatatgtattattattatccgtattatgtatatgattacagacagcagcctgatttaagtcaggtaaatcataaaatgcgaagccatttatctgcgattcaacaaattccaatacactcatcctcctttcaacaatcaatggctgcggtagtgaaacacttgcaggctgtcagcagagcactcgctctgggatgcggtatgagttcagaattcagatttcttccagacacttggggattacgagaacttcatattgtacacgcgaaatatcttactccgttgagctatcacgtttattccgctttaggcgcagcagagcttctcgcctccggacaaggccgggctcctcattttcctcttatggtaggctgcatgaattcaatacttcgtctatggtcaaacttccccgcagcgatagcagacctgcgaagagcagccggtcaccaatacgcgtcatctgtagacgaggcggaaaatctcctaagaccaatggttccagccacacaacaggcattatccatcagtcaatctgcagtgagtccggctatttggcaggcttccttacgtgccgcgcagttagctagggaggtacgtcagaatgttgcacaatcaatgagtcagggatcttcttattaattaagccaaaagattttttcggctttacacagtcacataaccggacttattcaacacaaaaaagagcagtaaacacgtaagttactgctctcctctgtctatccgccgttcatttgttttacaatgtattcagcatcatttcctacaccttgaagcagcgctgaacctcgcctatgctgccaaggcaaaccaataaagtacaatccttccgcagctgaaacaccccggtgatgtataattcggccttccttatccaaaacaccttctattttcatccaacaaagcggattcttaaaaccagttgcccaaatgatattgtttacttctaatgaagatgaatctttaaaaatgatttcattttgctttccggctatgactctttcttttaagatgatcttcttctgtcttattgcatgttttaattcatacccaaatatggggtcgcctttcttctgaatgaacttgcctactattgatgtatgacttgcatgtaaaactcctaatttatcaaaccaccaaaagatgcttctttttccaatccataaagggaaataaaccggtttattactgcaagccaaatatgtaactctttctttggataattcaacagctatctgagccccgctattcccgccgccgactaccagtacattcccaggcgccagttgttttgaatgtttatattgtgaagaatgtaattgatgaatatgatcggctacatcccttgatattgatggaatgttaggggtatgaaaaggacctgcggccatcacaagattcttcgtttgatattcttcccgatttgtttttattaagaaatagttctttaatttttggacacttattacttctgtccgtaactggatcgggatttcaaatctttcaacatattttttcagataagcagcaatttcattttttgaagggagtccatgcttgtctccttcaagctgcattccaggcaaagagctgtacattcgagaagtaaataaaaccaatgagtcataccggttgttccagctttctcccacttcatgacttttatccaaaatgataaatttttgtttcgacttctttagataatatcctactgagattcctgcctgaccggctccgattactatcgtgtcgtacatatgaatccccctccggttttatcttaattgtcagcagacaaagtgagtccctatttcctcctttaatgatgatgatggtcacgcggattctcagtttgggcctgacaaagaatcgtattgtcgtgattatgcgctgctgtttccatttgaatggttacatgtgtaatgcctttatctccaagttcatgttcaattttgcgtaaaatactttcactttcagaaatggtcagttcatcgttaacaacagcgtggcaggaaagagcattcaatccgcttgtgatagaccatatgtgcaaatcatgaatgctttgaattccttctgtctcttcaattgtatgaatgatgtcagtgacatcgatattttccggagttccttccattaatacgtgaatggagtctttcgtcacatggtaaccgcttctcagaacaagaatagccacaatgacactggccactggatctgcccagctccacccgaagaagatgataaggatcgcagccagtatggcacctacagatccgagcatgtcacttatcacatgtaagtaagcccctcttatgttcaggttattctttgtatctccgccgttcagcataatccaagcgaccaatatatttacagctaacccgatgatactaatcgtcagcatgccggttgttgctacctccggcggatgagagaaacgtttaattgcttcataaatgatataaagggaaatcaatattaatgcaacaccgtttatcacagctgcgagaatctcaaatcgtttgtagccgaatgtcttatgatgacttgcctttttttcggccaatttaaaagcaatcagagcaaccattaatgagatcgagtcactcagcatatgacctgcatctgacaaaagcgctaaactattggttaaaaatccgcctatcgcttctattatcatataacctgtaatcatgataaaagagatcaataaaaccttcttattggatccaccagcgtgattgtgacccataaaaatctcctccttatctcatacactgcatttattatttcttttctgttatgaagcattctaacatggacaaaaaaataaccttatatgattatgtgctcatatatgaatatataggttctttactgaaatgtcaaaatcttttcaatgaaaatgtccaatactttatattgctcttgatcaatgattgctatgaagccgcggattacagtaattactttaggcgcagacaatttagaaaaatcgcttcacttctatcgggatggcttgggtctgcctacagagggaatagccggtacagaatttgaacatggcgcagctgccttttttgacttacaaacaggactgaaacttgccatttggaaccgcaaagacatcgcacatgaaacaaacgttacgttaactgcgccaagccctgcagaatttacatgaggacataatgttggcagtaaagctgaagccgataaagtcatggaacaggcaaaacaggcaggagcaacgataactgatcccgctcatgatactttttggggcggatactccggtcacttccaagacccgacgggcacctatgggaaatcgtttggaatccgcactgggatgcaattgaataaccaaatttagcaacgataaaaacacacctgaatgttctggtgtgtttgagataatgtttagaatgcagatcaaaacgcagcgtttttattttgtttaccaaaacgatcaaactatttatacgatggcgggatgctttgcggaaaacggaatacattttcgggatcgtatttcgcctttattctttgaagccttgcaaagtttgagccataatatgcttttccgaagttctcgatattttgatccggaacattcacatatgaacctgttacatatggtttcatcagctgacgcactctttcaactgatgcaagattcgaagcttcttgtgatttatttttccaactggccgtccattccgtataaaacaacggacggcgccaatagaaggctgtttcactgcttggtactctgcttatcgcgccgccccaattgataaaaaagaaattggtttctgtcccagtcgctttttctaaaaattgtctcattactgcaataggttcttccggccaaagattgagcgcccacgccgaggagaatttaacactctgatcagatctgccgggaatcggttcgtcaggatctaagaaatctatacaatccggatagtatagtgttttgattactgtttgtgccggcgttccggcatttaataaaggttttaataattgaaccagctctggttttgaaccgaggaacaatccttccgcatggcacaagccatttactttgctgtaaatctcaaggtagcatcctaatcgttcgtctgtaaatggcgcccatttttgccacgctttaaataccgtttctaactgttcccacggccaaataatattaaagacggttgcggttttaggggcacggtgaactttgaatgtatattgggtgttatatccgaaattgcctcccccgccgcctctggaagcccacagtaaatcttcattgcgggaatgatttgcttgtatgatcctgcctttggcatctaccattttcagtgcgagaaggttatcgcttatcaggccgatcgatcgtgaaagcactccaaatccgcctcccatcgtgattcctccgattccgacggttggactgtctccgaacggggccataaaaccttcccgagctaaaccttttacaagcgggccgacgtgaatgccggtttgaacggttgctaccgcgtttttttcatctaagaaaactttattcatgtcactcacatcaataacaattccatcacttaccgtggaaagatttttatccagagcatggcggccgcttctgacacgcataggtacattcttctcacgagcccatttaatagcattacttacatcgtatgaattttgtgcaaaaacaaagacaagcggacagacatcaacataagggttccaattcttaaccgcctgtgtatagccggggtcccctttgaagatgacgcgtcctgttaactgtgctgatcccatctatttcactcccaataagcatttgattccgataccagtatatgtaggaatgggacaaattcttagacagatgttctgcaaacttaaaaatagatacatatacgcgaagatgatataaaaacaaaaaaaagacaagagcggcaagctgccgaaactcttgtctctcctgccttttttatcatgataggcacttacatttattggcgtgatatcccgaccaaactatggaagtccatagaaaattatgtttgccctgccatgcatggttctgctgagacaccggctgagcaatctttctgcttgatcccccgacaagaatcttattctttatcgtttttgcacccctgtattgattttctcagtcaaaaatcttatcttttacgttatgaaaagctcttattttttcttcttgtgcttacgtttgcaatcctgttttttctctttcttatgacgttttttacatttcgcttttgctgctaattttgccgcttttacctttgcttctgccgttgctcttgctgcttctgctgctctggctcttgcttcttccgctctggctatcgcctcttccgctctggctctcgcttctgcttctcttgctgcttctgctcttgcttcgtcttccgccatatcaaaatcatggccaaggtcacaggcttcgttgtatggctttttcttctgaacgtactgttgatcttcaccttcgttataatacattacgccactccttctctcatcttttaatctttacatactatgtaaagaaataactgcagcttggactggtattttgatgaaccggcacattttaggataattttcatttatcgatacaacagattctggatgcttgatgaaacttgaatgatttttgacgattataataagcagcgtaaaaaggatgctgcgcgctgcagcatccttctgtaccaactttttgtgtttttgacttttagtttgcttgctgtgtttgttttactggttctttgctaaaaagtccgacaatgttccacaagataattgcagcagctatgatcaaacgagccgtactgacttcttggttagtaaacaatttatagccatatactgatcccaatgctgctatgcaaaaaatattgaaccatttactccaacgcaattagaaaactccttataaaacgattacatttccaaacaatgtattataatattaacacaatttttcaatatttaaccttaaatcattcttaattggttttcctgatcattttctctaatcgtcattcgatctttcggatttttgatcgttttttgttacaggctagacccagacatcattttcagctgtttgatcagttatttcctgccccgtattcacaacacctttaggctctacaagcaaaatgttacactctgattctgcataaggtttatgttcaacatttttcggaatgacaaacatttcaccttcatttaatgttacttctccatcacgaaattcaatgatcaaattacccttaatgacaatgaagacttcatctgtttcgtcatgcttatgccaaacaaaatccccttgtactttaacaagtttaaattgataatcattcatttcagcgattacttttggagaccattgatcttggaacgcagctaatttctcttgaaaattaatcggtttatattccattctttccgctttccttgtaaaactctatcatttaactagtcccaaattaaaggcctgtccacttcagcagttctgagatagtctaaaagctgaccggtatgtacggactcatggtaagcgattcttaataacatgtctcctagttcgcgaatatatccaacatcagacctgtcaatctttatatttgttaaatctgcttcgtttaacgatttgatgaatgtcaaaaactcggcccgatacggttttgcaaattctaattcttcggttactgtggtaaacgtttttgactcatacgggtttttagattcctctgaagactcattcatttgttttagtaaaatgtgatgataaagaaattctgcttctaatacatgtcttatcatttccttacacgacatggcttcggaatccgggcgccagtccattttttcctcaggtatagctgtccataacttgatgcttcgccgtcttacttcttcaaaatttaaaataataaggtcaatcgtattcaagtgttttcccccttttatttttaaataattctccttcttcccggaaaaaacctctttaaataaaaaacgtattctttcccaactcgctggattggtaatttaagataagaagatattcattcatccatacaatagactctggttgaacatatactgaatgatagttttcatcagaaaggagaaatcagctttggcaaagtatcggatcatgacctttgacgggggcggtaccttaggtgctttaagtttacagctattgaacagactggctgaagaaaatccagcattaataagccgaacccatgtatttgcgggaaattcaatcggttcatttactgcccttgcattagcaagcggaagatctccggaggaaacacttcagtattttgaggatgagatcctgcccgcattcagcgtttcccggccggggggacctgttttcaatcaacaattgccctattccggttttattaaagcggtgcgaaactttttcccgccaggccttcgtcttaaagatcttagaaaacgaattgttgtcccttcattcaaattatactccccagcactggatcgttggacgcccgtattatttcacaactttcccggctctccctatttaaatgagaaagtgagcgatgtcatactgcggagcagcggtgctcccgcgacgcagcgagcctatcaaaactacgtggacggatatgtagtggcaacgaaccccagtacggccagtatcgcgtttgcggttggtaaagccaacgtgccactggatcaaattgcggcgctatccatcggtacaggtgaagccccgactcggttaagaagagatacgaggggatggggaatggtgagtgcggataacatacgtcccgaaaatctgaagaaccttcctccaaattggggagtccttttggacaggtcgcctaatgaacctttactgccatttcttcagatgatctccggcggaaatggctactatgaatccatggtcagcgcgaatctgctgggagatcgctttttccggttagatccgcggattcctaacttctccaaaacagacccttccgtggttcccgctgtcattgaaattgcgaacaaaaccaacttacagcctgctaatacttttatagagaaaaactggaacgacagccactaagtaagtcagaagtttacgtcatcatacaatgaacaaaaaataccaagggactcaaaacccttggtattattaatgcggccgagagggtttggaccttcctggggtatttatacgctgggcattcgataaagtgaaatcttattaccgcccggcatttcaaacactgaagttaagcattacatccaacaatcgggccatttaattgaataggactactcagaagtcgcttcccattacgtaagaaaagcgactttttagatttgattttcaagttcctttgacaaattttgaaaagaccattgactattcagtcgaactgtattaagtttaactatatagtcagactgaatagaggatgaggatatgaaacataaattattaccgctgtctgaaaccatgcattatattttattagctttgcgggagccgcttcatggctatgccgccatgcagaagatcgaaaagatgagtaacggaactgttattttagcagccggcacattatacggcgcgattgaaaacttgaataagcatggctggattgaacctgttggagagtcgggccggagaaaagtttatatgataactgcggaaggaagcgccattttgaaaatggaacaaaacaggttactgcatattttatccctgcacgaaggaagtgaatcgaatgaagaaatttaagatgttttttgatattgaaaaagaggagcaatggctgaacgagcaattacaaaaaggctatcgctgtacaaatatcagcggattaggaatatacactttcgaaaaaaccgacaaaaaatatgtgatgagactggattatcaagattatttatcaaagaaaaaattcgaagattacagagagatatatgaagacttcggctggagttatataaatggcccttgggggcttggaactcgatattggcaaaaagaagatgatgatcaaaatgaaatcttctcggatcgccaatcaaagagtaattattataaaagactaatgagtttttcatcttgttttgggttactgtgcttgttttattgtaatatgatttacacgaattcaggtttgtatttagctgaaggtctgtggagtatggaaggcgcaatgttttggaaagcatttttatttgaaactccatttgcccttttaaggtcgcttcccgctcttatggccgttctctttggctgcagtttctataaagcgtatcgaaaatattcaatgttaaaagaacaataacgcggggaagttacatttaaagaagtaatcgaggatcatgtatctgccgaagccgggcgctttaacggaaaaaagcgccctgaatttgctgattaatcagacggcttattttgttaatgatacatacttatttacaatggcttgagcgagacaagctgatgaatcaacaaaggtaagttcgctgcttttttgatccgtgaccatatttaaatccgtacatgcaatgataaccgtatcaaccttttctgctaattcacggtgtaattcatcatataatgtaccagcctcatcggtttgaccttgtttaatcttttctattatgtgatcgacatagatttgccaactatcttgatgtaaaaaatcataaccttctctgtttaacgcttcttgaaatattccagattgaaccgtaggaacggtggctaaaagagctgctttttttgagcctttaggtattttttttatggtttcatcaaccatgtttagtaaagggactgaaagcgatttttttatttgattaaaataaatatgtgcggtattacatgggattgcaataaaattaacacccgttttttcaagctttacagccccctcaataattgcattttccatgtccgtatgattgagaggtttattcatgtagaaaggagtcggacaagaataaatcatcatatgaggaaaatccatgtcgtgtattgctccatatattttttggcactcgtctactactttatctacaaatggcccagtagattttggccccattcctgccagtattccaatcataattgtcctcctctgtaaaaatgtgtacgaatacgatcacgatgagttattcttgtgtttctcatctgaatctgctctcatttctttttggctgtcttctcctattttatcatttcattaatcgaaaaagggactttaaaaaagatagctggcaaaccagacgacttgctcttgggcgccatgtttgttaaaatcaccatcttcgttttaaaacgtacaggtttatagtgtcccataacgctgtcctaaataaaacactggtcgcaactaagtcaaatgtttttcacggtactatagtcaagacttgcccaagtcaccattatcaaaaagaatttcatcaagcacttgaaacatttattgaacgtgagcaagtgttataacatgaataagaaaccaaggagtgatgaatcttttaatctttcattttacccgctgactcatatcaaaggagctctaaccaaattttaatagctgtcgcacttattaataacgctaaaatccattgcaggaattttgtatttactttttgcccaacagatgcgccaataggagaagcaattaaactgacaatcataagaaccagagccggtgcaaaaagaacctggcccgtgattacttttccaactgttgcgccaatagatgaaagaaatgtaatcgcaagagatgaagcgactgtgattctaacagggatatttaaaatcgataacataatggggaccaggataaaagcgccgccagctcctaaaatacctgatacgccgccaatgataaacgctagggacgaagccaaccatttattaaatatcacttcttcgtcttcgctatgttcttgtccttttttaggtataaacattaaaacaactgctagtatagccagaattccgtatataaagttaattcctttttcagatatataatgagaaaagtaactccccaatacactccctaaaaggatgctgcttcccatgtacataattaatgctttatttaaaaaaccacttttacgataagcccaaacaccgccaagtgtcgcaaagaaaacttgaatagcccctatccctgaaacttcatgggcagttaatgacatcactcccactaaagaaggaatgtataatagcattggataattaataactgatccgccaatacccatcattccggaaataaaggcaccaataaaccctataatgaaaagagttgtgataaaggcaatatccattttggttcctcctttcaaagaaaaagggcatctttgtattcgataccctttcacatttattagccttttttaatccagaatttcaatacatcgccttcatcagtttgctctaaaaggtcatgcccgcctgatttagaccaagctgcaagatcatttttagctcccttatctgttgcatgcacttctaatatttgacctgattccagttcattcatcgctttctttgttctgacgattggcattgggcatgccaggccttttgcgtctaatactttatctgatttcatgttcatctctcctctttttaatagaaacttgtgttaccgtattgcacagcggtttggaccaatctccatttcacgctgtttttcttcatccgggctgattttccccatgtttgtttctcgaatctcttggtatgcatttggctgcggaggcaaatgatctgttactaggtgtctaaattctgtttcatccgcaatgttcaaaccatggttctcgctaaataatgtacgtagttttttaccaacacttccatcctcatttagctcgtcaatgatcataaagtgtgccggtaatacaattaaatcctttgataacgcgttgtaacggctataaagcgttgttcttaaatctcccgcccaatcttctgccatatcggctaagtctggtcttccgattgaatcaataaacaagatatcacctgaaagaagatactgatcatcgacaatgaaagaagtggagccaatcgtgtgccccggtgaataaatcggttgaatgccaatctttgtgtttccaatgacaatatcgttgccttcttccagcggctgataatcaaataccgcttcttctgcatccttcggtggtaaccagtaggttgcttttgttttttcagctatgactctgccgcctgaaatatggtctgcgtgaagatgtgtatcaaatacgtgagtaatctccgcgcccttctctttcgcaaagtctataaaaatatccgccatacgtgtcgcatcaataatcgctgcttcaccattggaaatgaccatgtatgacaggcagcctttaccgattcgaacaaactgatacatctcaccgccaccttttaaatccccgacttttaccggctctaaatgttcgctccatgctttcattccgcccttaagataggatacagaatgacctgcttcagaaagcatttcggataccatgacagatgaaccttcttttgcacaaacgaccagcacttctttatcagaaggaattttctccaagatatcttctacgccatctaaaagatcgaaatacggtacatttaaatggtcaaaataatgtccttcaatcttccaatcgctaaaatcattttcattacgtacatccagaataaataaagattctttgtgaaagattttttgtgtgacttcttttgcggtaagtgcttgaacggtcatgtttacatacctcctttttctgttttaccagtccaatcccgcataccggggacaacattaataacctttttaaaaccttgttttttcatggtgtgggccgccatttcacttcttcttcccgaatggcagataatataaatttcatcatttttgtttaattcgttagagcgcttttccacttcgccaagagggatatgcaccactccggggatatgggcttcttcatactcctctatctctcgtacatctaaaatgtgaagagactcgtcactatccactttctgtttgaaagcttctaatgaaatctcaggaattgaagctgcattttctgctgaaagctctcctccttttcgaagaaaatgacgaagtatttccccctctgcttcagtacctagatattcatggcctgtactatttgcccatgcttccagatctgctgtagaacctttatctgtcgcttgaatttctaatatgtcaccagcttttaaatccttcatactcttcttcgtttttacgataggcattggacacgccaaacctttagcgtctagtacaatatttgctttcatcattttttcctccttttctcatataggggcgggggtatataaatatgcaaaaagttactctctggatgttaataccatgtattcataccaccttttatatttgtgatatttttaaatccttgtttcttcaatactttacttgcctttatacttctcattccgctttggcagatcacaaagacgtctttgtctttcgaaagctgatgagtttgacgaggcaagatagacaaaggaatattttcgaaccctttaatatgccttgtgcggaactcataaggtgttcgtacatctataaactgtttgtctttatttttcagctctgactttaaatcagcagttgttatttgtttaacaccatgcaatgggaaaaaacgtcgaaatacgatccaaagtaaaaataaaatgagtaaagtattgaacattactccgctattcatagtgttataacccccttcacttattcaatttgcaatggataacattagataaataagttgacattgccttcttcagcatctgccaaataagcagctacaccagcatagtcgatatcatctaatagttctttttcctgtaaaccaagaagatccattgtcatcgtacaagctacgagctttacaccttgttcttgagccatctcaatcaactgaggcaacgtaagtgcattatgctttttcatcacatttttaatcattttagggcccatacctgcaaagttcattttagataaacccatcttatcagcaccgcgaggcatcatctttccaaacattgtttcaagaaatccttttttcactggaatcagctcttctttacgtaaagcgtttaatccccaaaacgtatggaagatcgtcacttcatgatcgtaggcagctgcaccatttgcaataatataggctgccattgctttgtcatattcgccgctaaataaaacaattgttgtgcgttttgtttgttttgtcatgtttattctcctgactaaccaccattacccctaggggtatattagaattaaaaattttttcggaagatctcctattattcaacccaaaatactggcaggggtatattataataaatataaaaattcgtcaaccttaaagatgataggttgatgaatttttttatcggctctttaccaataattcgaccgcttcttttactaagtgttgtgtgtcttctcccttttctaaactttcacgaacacaatgttcaaggtttgtgctcacaatcaaacccattgctcgatcgatcgcattacgtgaagcagctaattgggtcacaacctctctgcaatcttttccttgttccatcatggtcaatacaccttttatctgtccttctatccggcgtaagcgatttttaatcttttgatcatattccatgcgttgaactccttctttgaaatttatatatttgcatgttatcaactatcacttcatactatgctttatcacactacattattaactagataatgtttgtgaatcaatattatacccttacaggtatactgtcaattttcaagacggcatgagaatgattataaagagttaatattagtaccccctgttttacgttaaacccaaaagattaatcacaagaagtctccatatttacttaacatgctcttaattgcataattggtatccttgaggagaagaagacatcgaaaaagtaaaaaagtaaacaaacctaggattcaattgctgtcattgatgtcaagtcatgaactcctaaaggagatttaataactcattttcaacgaaaaactgctctctgttaattagtcgagattccaagatatacacggaccaattgacctttccttttttaggaatcccacaggctccctcttgttttgatgctgtttttccaaaaagttattgacaccaataaacgaccatgttatcattaaaaatttgatatctcactccatatatgataaccttaagttaagttcctatatatggaggtggatgatatgtttcaaattggcgataacattgtttatccaatgcacggagcaggtacaattgaagccatagaagaaaaacaattcttagaggaaaaacaacagtattatgtcataagaatgtcaatcagtaatatgacagttatgattccaacgcgtaaaatattgagttcaaatatacggccggttactgatatacgtgcattaaaacacattatacacatttttcagcatggagaatcagataggctactgccgtggaagcaaaggtatatagtaaacacgaacaaaataaaaacgggtgaaatacaagaaggcgctgaagttgtacgtgatttaagacggatgaagaaagaaaaagcacttaattcaagcgaaaaaaaaatgttggataatgcatatgaatttttgattagtgaactggaattcattaaaggaatcactgaaaaacaaataaaaagtttttgctaaggttaattttaaataatgttttgcattccaaaaagcacccgaaagttttcggaatattacgattagatgtttaacttcttcaacttacttttaaaacattaaccccttttattaccccaacaatctaatctgttttatttttttcttcaacgaacatttgaatttttatcaaaaaactcgatgaaatagtcacttaatttttgtaatcctgattcacactggcacggacaaggagccgtaaggatggaagagaggcagggctttcattgttttaggtctaagtgattatttccagaagaaaaaacaaccactctcctctttatctttaagaatttcttacatctgcttccacagtgaatagcagttgtttatcttctttttatattagagatatgcgaaatgtaacaaagaataacatacagatatattgagaacataaaaacaaatcatttatatatattccacatatcgtcaatccggtatgttatactgtaaacaatcctttgaggttttaaacctttttcttaccttgtagcaactgtccctactcgaacgttgagtagggtttttttattcagtatgatacagagaacataaaaaaacaggctctatataaagagcctgtttgtataaacgattgaagattaagcagttttttgaacgttagcagcttgagctccacgagcaccttgctcaacgtcaaacgttactttttgaccttcgtctaaagatttgaatccgtcactttggattgcagaaaagtgtacgaatacatcgtctccattttcacgttcgataaatccaaaacctttttctgcattaaaccatttaactgtaccttgttccatttttgttgcctcctagtgtgttacacattgtattactatccttgcccaaagtatcatcaagacgaaaagtcgatattcatactatcctttacacgaacaaaaataattcccctttatcatagcacgaaacggaaataactgcaaattaataatgtgttcattcatgttttatttgttaaacctgtcgatacgagtgcaaaataagatgcctattaataactatggtttgaaaacaccgtgaaaatgaatcacgagtgtcttcaaacccagtacttcatattgattgttaaagatttctttaaaaagctcagctgtttcttgttcaagtacaagatactcttggctgttcactggtatagctttgtttctgcagatgtttccaaacgatcattcaagtataccccctattttaacggtattaacttgtcatgtttgttcctcaaacaatcaatgtttacggtctaaataaaccgattcacataggggagcatggagagagtttggcccgataaagagccgggtataatcttcatacgctttttgtatcccggctggccattgctaataaagatttaatcgagatggagatcagtttctgaccttcaataattttacataggattaggaaagatacttattatacatggaacttattcagcttctccaacaactgtaaagcgttcatttatatgttttggattttcaatttcatccaatactgcaattgcatagtctgcatagctgatataactttcgcctttcgaattcacaagaagatgatcttttcctgactgataaaatccagttcttttcccgtctgggtcaaataccgctgaaggactgataaatgtccagttaatatcagaagtttcctttagttcttgcaagttacgaccttgccctttagctgttggaataaaaatctccgggaaatcaggtgtatccattacactgacagttttattttcgtctacataaagactccctgctccacctacaattacagctcttgtgcccgttccttttaatgccctaattaatgcccggccagcatctacatgtgcctgttcttctcctaatggagcaccgaaggcattaactgctacatctaacttttttagatcatccgatgtaagatcaattatatttttttcaatgattgaaatcttttcctctttaagttttgcagcatctcttacaattgcagttacttcatgtcccctgcttaccgcttctttcaagataagacttccagcttttccggttgcaccaatgattccaattttcaatttaaagtcctcctaatcattcaaaattttaaatgtaaccatattgattacatgtaataattttagttacaccttatttatttgtcaatacttttatcatcttgttaattgagcatattagagtaaaagaacttgtaatacattcagttacaagtgtactataaagagtgtaacgtaattaggatggtgaagaaatcatgtctattagcagccgttttgctgtaggaattcatatattggctcttattgaaataaatgaagacggaattagcacttctgaatttttagctggaagtgtaaatacaaatcccgccttcataagaaaaattatggggatgctgaaaaaagcaggtttagtaaaagttcggccaggtattgcaggagctgaattagcgagggatttaactgaaatcaccttacttgatgtttatagagcagttcatgttgttcaagataaagaattgtttagtatacatgaaaatcccaatcctcaatgtcctgtaggccggaacattcaaagtacaattggtccaatatttgaaatcgcccaatctgccttggaaaaagctcttgggcatatcacaattgatgatgtggtaaaggatattattgaaaaagaaaaattgaccaataattgttaaatgatttcacagaaaatcttttatcagattgaggataagaaaaatggctttttcatgaacaaaaaaagagcagacataaagtctgctccttttgatgaaagatttagattacggtaagggatataaatatgctcatgatacagaggaaaaattaacgacaatgcagacgatgccagattctttaataggggtgagtattactatccaacaactcaaggttcagaagctaagttcaaacaaagacttgaggaaatctcggattggtataaaagaaaccgcaaatcttagtttgaacaaatatgttctgtatataaaaataatgaggtatggagtgaattgataatgaattatgatgaaataaaagattactgcctaacctttccaaactcttatgaagaccatccttttggagatggttggactgcaattcggcacaaagggaataagaaaatatttgcacttatcttcacccgcgacgaacacttatgtgtcaaccttaaatgcgaacctgaaagggctgattttctacgtggtctttttgaagaaatcaagcccggataccatatgaacaaggagcattggaatactcttaccttagatgagggactcccagagcaccaaatccatgacatggtaaagtacagctttgaactgacaaaaccaaaaagtaaaaaggaaacataacatcgagggatagaacgctcattatagatattcatccggtgcaatgatacagagaaatatgcaaaaaacctcaaggcagcaatgtttaaattcgtatttacgagatgattttttcgttattgttagtcctttgtttcttgacataggttgaacaaataaaaaagagcagactcaaagtccactcaattcattaagatgattgcttatttcatccagacacctataaaaaatgaaaggtgacgatgatatgccacaaaagtcatttagcgtttaattaatactgataactcaccttcaaacactttttcttctttctgattataggtagataacaatacagtaagtatccccgtctggcttttatttggttttttatcaataaccttaacaatagtgtgcagtttatcattagggtaaacgggtgctaggaattttatattattcattcctgtcccagcaataatatcgtcttcatgacacccttcttcaatccaaagcttaaaagtaatagataacgtttgtattccagaagcaataattccattaaatctgcccatttttgctttttcttcatttaaatgcatgtattgtgggtcatacacttctgcaaaattcattatattctcttttgttaattcaaaagatttagtttgaaaaacctgcccgatggtaaattcatccaacttcataaataaatctccttgaatctaaactttattattaaatctacgtagcattttaacatactggctctcacacaacaacttaacggtgaaacaatcgttcccctatcaggaatgaacaagcacattgtttttgtttccttgcttttaacctctttataatcaggtgttttcttataaagaccaaggcggtcgccatcaccatcacccggcatatgtgtcatttcctcataagaatctccaagcttctcataataagaataagcagtaagcttgcgagaactttcttctggctgataaaacgcaagttgaataaacttcccgtcatcatatacacgaattatggcgttatctcttttgtactcatctgaatctgctcgcatttcttttctgactttcttctcctgcttcatcacttcattaattgcattatcatatttactaccgccgcacgcagtcaacagaaggatgaaggtgactgacaaatcatacggcctactatacagtaacagatgaattttccgcaaaaaaaataccaagggcgtctacaacccttggtatcattgatgcggccgagaggacttgaacctccaagggttattcacccgcagggccctccatctatattcataaaactattgctcagttgtcagcatgttaagtaaattacgaatttccttgttataacttttaatttcttcttcattacaaccggttttatcaaatactgcgttaggtatcattcacgatttcgtgatgctcaacgccttagctaaaactgaagctgcgcgcggagcaattgatcttgccgcaacatggctgcgtaaagggttttaattcatctattgtttcgtcacttagagactgctgcaaataaataaataaaaacaaacagatccactcaaataattgagtggatcgtatattgattcaataacttatcgcaaatatattaacgttggaataatggaacttttgatgagctttttaatcgggctggttattattttgttgttgagatgtccctaattgaaaagctaactccacaacaaactctattttttcaccagtccaccctcttcatatccaaaaaacctttgttgataaaaacaataggattattagttagcgtacaagttctcgttttctgctttggaccccatatagaaaataaaaagccagctctccttcgggagaagaactggcataacaaagcttcttgtttcttattttgctgtattgctcggaccttttaatttctcttcgttcttgcgtcaatgttttattattaggacacaaccaataaaataatgacgatcgagaatagcaacgctgcttttgcaaagcagtaagccctccagaatataaaagagctgcagtcattgctgctcggataatcccagcttattctgagtctgtatttcgagtagccggtcaattaaatggatgtttttttcattccttttctgtttgttccattttccaccatagtgaatcttttggattttcaacagcctcttgaaactcagctttagaagcaactgttgggtaagaaccttttaaagatttacctgaagtatctttaaataaggttaacacaactattaagccaattaaactaactgccaataaatagaaacccggcgccaaattgtttcttgtcacatgggttaaccaagaagcaactaaaggtgttgttccgccaaaaatagaaactgataagttgaatgtccaggataatgttcgatatctaatgtcagtatggaacaacgtaggtaaagatcctggcatagtaccttcgtatacagataatacaatacctaacattaaaagtcctataaataagaatattagactccccatattaagaaattgaaaagagataatcgaaaatacaattcctaatactaatccaattgttataacttttttatttcctaatttatctcccaatttaccaaaagttaaagcgaacggtaccataataatcaatacaattgctgtaaccggtgtacttatattatcacttataccaaggttctcatctaaataagaaggcatataacctaacaataggtaattggttatattgaaaaatgccacaaatacgatacataaaaagatatcttttttatatgttttaatgacttctaataaacctggttgttgttcttggttttcagagatgtcattttcaaagattggtgattcatctaaatgacttctcaaatataaaccaaataatcctattggaatactcaagaagaaaggaattctccatccccaactattcatttgaacatcagataaagtccagaaaagtactgtaactaaaacagacgctactatataaccagataatgtgccgatttctaaaccgctgcctaaccttatacgtttattatctggagaagattctgcgatatataccattgcaccagcgtactctccacccacagaaaaaccttgcagaatacgagctaagagtaataatataggggcccatacaccaatctggtcataggtaggaagcacaccaattattaaagtagataaagccatcattaaaatagtaattgttaatactattttccgaccaaatttatcacccactttaccaaaaataattccgcctaccggtctaagtaagaaggcaattgcaaatgtagcaaaagtaaatattaactttaattcatcgttttgaaccggactgaaaaagtttttactaataataactgccaaataagaatataaagcaaaatcaaaccattccatcgcgtttcctatccctgtagcaaacacgcttttcttcgctttttgaatgtctacaacgttaatttttttcttgttaaacttcatttaataatatcgactccttaattatcaaatccacattatacaagcgtataaacggtccaagcatgcagtcccagaatgtatagcgtaatgcttctctaaaagtctgggggtttctgtttcacctgatggagagctaacggcatagtggatgattggttcaactgtaccttaaaagactagacgaatatccatatcagcgccaaataacattgtaaaccaggaaagaaggatgaaattcagttttttcgctggtttccttaacttatttttgccgattggactaaaaataatacaaaaagcaacaaaaagagaaacatccaacagataataccagccaaagcggttagtgatatatccgtaggctgtggttggtattttctgcagactatttggagaaatgattccccttcatacagctctattgtgaatattatcacaatcgaaaaaaaacttttatttcttcaaaggatcctaaacctatattttagttcttccattacgtctttatttactgattctatctttattaccccgcaatcaggtgaaacaaaacactataaacgtagcatacctttttaaaatctgacaagcccaacagggtgatagaaacccggctaaagccaagctagtcaatggatagaagaaatttttttgtttttcccaaggaataaccgtctgcgtttaatctagcccaattagaaagaaaaagagcaggagtaatcctgctctttcattcaaaactttaatttgtatgaagaatttcgtataccttttcgactttctttacctattaatcagtatacagactacaacagaaataagtagcaccgggtatgaaataatggatgcatttaaacaagccaatcaccgacaattgaatttattgcatgacatctaacaaaattattttttaaatccagctgtaaataaagaaacatttcttaggtaatggttttatttttggtaaatcgacatgtatttgtttccccttccctgtaatccaaatgtttcgatatgaacatttaatcctttcatacatttatcacaattttaacaaacttttaactgaactgggtaagttgaacaaggattaaacattgaattttgacaatcacaaactgtcatatgtgtccgtcatatcaaaagaatctctttaaggtgttgtttagtgctttcgttacggcgactatcgacaaataagaaccaagcaaagtattgtccagatagtttgagtattttgatcactttgcaaataagttattgaaaatacactacctaaaatcactgcagccaatagacaccggctgattttcatcaataatctccccttttttatttttcgtagagagcattaagcttcctcgttcatgaaaataatcagcgacttcaatcgaaaaattttcaacatcagcaaacattttcctcgaagtcttggtattcttccttgcttagcagcactttctctgctttggcaaattggagtttgaggcattagtaactacctataaagatgaaaatatttgtgcgatgtctactgcagatgacttactttaggtaagtgggcagtttgtgggcagtagatcatttaaaaataagcacaaaaaaataccaaaggtggttaaacccttggtatcattgagatgcggccgagaggacttgaacctccacgggttattcacccactaggccctcaataaagtgatagcttatcaccagttacaaaaccccgtcatttcaagcatttgatgttattcattacatccatttacaccgttttttattgattttggacacaaaatggacactcactcactttcaaatatgagttattaaatagttatgtatctgctcacattcctaatatgtgtgtataactacgtatatatagttatacttgccatctaacaccaaagcgaaaaaacggatcgttcattataattttctctgtatcagtattataatctaaggcaggctctaaaggagaggtttccttacagatatcaaccattttatttaatgtatttactatgtgacttctagacataccctttactccaggaataagtaaatcgtttattacttttacaaaggatttaattgggatgtcctcatgatgtgctacttctgcaagtcctttaagaataatctcatatgagtctaactttgaaccatctttcatatcatacgaatttcttttttgacctttagtaacttttccgttttttaatttctctaataaggttacattagtttgaggcaatttggaataaatggttttcagatcatcgggttctaaattaattttatactgactatcacattgctctcgtactccatgttgtttgcaaaaatgtgcacaaatctcctgcataagataagggtttttaaagctgttctcaatgaaagatttaataacctctccttcaagaagaatatttaatttttcaaaaccggaagtaggtatgaattctagttccttttcttcccattcaggcactctaatgttattaatcctagcttccatatctctttcggctttcactacatcctcgcctctattaggaattaatataatacaaacatggagtttctccaatatgtatggttttaacttatgtattatttcagtttgttcgtgtgattctaaataatgaaaatcatcaaatactaatataaattcattatctattaaatactttgtcgtttgtttgagcaaactttttttatactcttgagtaacttcattttcacttatcatttcacctttaattcctgctgaactgttaaatttagctttaaaaaaatgaagaaatgatttcgccacagagacttctgcttcagcagaaatatgagcttcaacagcgtctttagttttaactgtattagtttcattactaggaacctcaattaaagatgctataacctcttctaaaattcccccttttaaatcactcggctgaataaagaccaccttgtcagccggcaagcattttttcgctaaaactgtttttccaattttagaagggcctgatagaactattatcttccctccatactctagttcgatttgaagatcattttcaagttttttttctttcctttcattgtatgtatattcgggaatcgaaccaggagtgaatacctcacttgcttttattttgctcatagaaatgcctccaattttttcataatttcctagtaatattatactctttttttacaaaaaaacacaaaaaaagaagaggataattcccctcctctttatgcaccaactcgatctgcggcaattttaaaactgtcatttgaagcactgtccacacctgcaaagtgaacaaacgttaaaatgctactcaacaccattactcccaatagaattcggctgatcttcattaataatctcccctcttttgatttttcgtcttgcttcaatactcatacgataaaatttgtttgaaagttctaattccccttctccataaaaataatcgcctatttcagttgcaaaattctccatgtcagcaaacatttttctgtcagcaaggtaagaaaatgcttcatcaattaattcatattcaccatttgaaaaataaagtccttctaaaattttaaattttgcaatgtattctttatcattcctattctctgcttcgcttcgtcctttaatgaaataattataagctatatcaaaattatgttttttggcatatacgtgagccatagcaaacaaagcttttgtcaaaaaactatgtttagatttttcaaaaatatctatcgacaatcccaaatggatagaagcattattataatcctttaactcttcataacaaatcccaatgttcatatgagacataccaatcagatgaggaattttggtgtactctgcaatttccaatgcattcaaaaattgttgcaacgctctttcaaattccaaagaatctatcaaatttcctgctactataaactgacagcgcaatgtttgaacagcgtattcatcgaacttctgaaatattttcaaagcacgactagcataattcatcgaaaagtaagtctgtttcatataataataaacgtatgaaactttgaaaaaaaactcagctttttctatttcatcttccacttcagaaagttttgtttcagcaatcctataagcacttattgccgttgttaattctttacgtctgaactcgtacatacctgtaaaaaagaaaaagtaatactcaagcatacccgttaattgcccttgctcttccatttcttttattgtttcatacgcactatttaaatcatcaatccttttcgattccatataactcaacattatctcgtgtcggaattcaagcaattgatagtataacaaagcgtcttgattttcttccagattcactaattctttttccacttcttttcttatatgctcagcctgttcaacttgatcatttttaataagagtataccaatcattcaatttttgagtgactaggtcgtacggaatttttctgttttcatccaagagaatccggtgcaagcaaattcctccaatgcaaaaaggtacgaatagtctattgaagaaattattcttttcgtctttattgcggttattgtaaggcttttgtgtcttgacacgtgatccataaataaagaaaaacaaaacacgctagaaaatgttctaacgtgtaaagattacttcattgtttactaaaactgaatcttttgaggaacgtgttcgaccgattacctcgggtcaatgcaaatacttgatggccgttttgtattaatttaggaagaagggaccgaccaattactccagtccccccggcaacaatgatcttcatgctataccttatttacctgctaatcttgaagcagcttcttcaacttctttatttgctttttgtaaaacatcctccggacttagtaaagctgttccttgcactcggataatttgataatcctcaataccgaggaaattgaacattgatttcaaatatttattagagtattcaacttcttcataccagtcatcatttgtataaattgatccgctggcttgtatgacaagcattcttcgtccatctttaagcagacctactgacccagtgtcagtatatttaaatgtttcgcgtgcgatcatgatattgtccatataatcttttaattttgatggaatattgaaattatgcaaaggcaaaacgatgacatacgtttttgcacttttgaattgtttcaatacttctgtcatgcgttctgttactttttgttcatcgcttgtcagttcttcgccctttccagccttatcccatgcgcttaaaactgttttatcaaccataggcacttcatcactatacaagttaatctgctcaagcttttcactctctggaattaattctatgtaagtttccaaaaagtgtttcattacccgtaaactatatgacaacgtatcatccacttttggatgtgcattaatgataagtgttttgctcatttaaaactctccttttattttatattaaagattaatttaatcgacgatcaattcggtctttaatataaaccctgcagtttattttgtcaaacggaacaaataatatactaaagaagggttttaagattgactatcatcaaaaatactcctaagatacaatgtgataacccttaaaatcaaaagcaggtgagtttatatgcagtacagtgttggggttgaatatgctttacattgtctggtttatttaatagatgttccctccaaggaaagtgtcgggattcgggatcttgcagagttccaaggactttcagaaacatttctttcaaaagttttcggtaaattatctaaagctggtattgtaaattctgtccccggtgtaaagggaggatacaggttagcaaaatccccagaagatatttccttttgggatgtaatagaggctgttgaaggaccaaaacccatttttcaatgtaaaaatattgtaagcaatggtctgctttatcgagacaaatgcaactcctgtgaatccagcaattcttcttgtacaattaacttggtaatgcttgaagcagaagaacagatgcgtaattatcttcgtaataaaacgctcgcatggttaaataaagaattggacgtagtattgcctaaaaaaacaaggacagatactcgggaatacttcataaaaaaaagctctgactaaattaattagtcagagctttttttgcttcaagatgcctttaaattacaagtcatattatgttttttcgttttccatctcggcgtttgaatttgtaaaaacaatgccgtacctattggtgcttctcttgcataagaaagcgcaaatgttatactcatattaaagattacattaatcgccgatttatatggtctcttttaaaaaaaacaacaatcttcttattttacagattaatttcaaaaaaggaaggagaaatgtaaaatgaaagcattaatgactctgtatcttaggctcgctttaggaattagctttttatcttctgtagccgatcgattcggaatatgggggacacctggcaagcctaatgtcgtatggggaaacattgaaattacacggattatgtcgctgccttaactccttttataccacatgctcttgtaccgatagcaggatggatagcaactatgtttgaaaccatcttaggaatacttttgatcattggtttcaaaacaagaataactgctgtattgagtggtgctatgttgattattttcgctctaggtttaacagtaggaacaggttttaagacttctcttgactattctgtattctctgcatctgcaggtgcattcatattaatttattttaaaagaataccctatagtatagatgctttactgatgaaaaaaactgcagaggctgaatcattttcactagagtcagacaaatagccctcaaactctaaaagatagggtaagaaatatcgaagcataaaaaaggagcagacataaagtctactccttaaatttcagtttcctcccctttaacttcttcataatcaggtgttttcttatacagaccaagtcggtcaccatcacccggcatatgtgccatttcctcataagaatctccaagcttctcataataagaataagcagtcagcttacgagaactttcttcaaaaaaaataccaagggcgtctacaacccttggtatcattgatgcggccgagaggacttatacctctacgggttactcacccgctgggccctcaacctagtgaaaacgtatcatgtattacataaaccttataaaaatcactgaaaatattagctttaaatttgtaattccagctaagacctaagaaaccactaacaaaagaagtaaagtggtctcgcccaataggtgcgatagttttttcttttggtagtatcttgacttgtccgattttgagaaaaaaagagtacgtattaatcttgaatagcacaaaaaacactacccttttcgttactttagagaaaggatagtgttttttggttttgcgggtatcggaaaatctttgctagtagcagtacctcaataaaagatcgcaaattccacttacctagctatatcaaggcttacttgtctgatttgggatgtatggggtacaaaagttgagttacaaacattattatccaaaagtatgtttactgtaattattttacatggtattatttatatcatgcatatgaaatatgtatgtataataaatgaaattaaaaggagtgcttgatcgtgaatcttaagtccattttcaaaggagtaacatcgactctgatagctggtgtaattgttggaacttgtactatacctgcttttgcggagtcgactacaagtgtatcgtcgaaaaattatgcagttacaagtggagtattcaaagctctagacagggaggtttcagaggacactgttgatcaatcaagctggagtcgggagttcgaattagatgagaatgacggagcacaagtaaacttctggatttcaaataacgggagtaatgacataaaaatatcaattgatggaaaagtctcaagaaccatcgcaccaggcaagcaaggcaacatttctgccgaggttaaaaatggttggtttggttggacatacaattacacatttacagcttcaccaacggctaaaggtggtagtgttaagatgaaatataaaattgctcaaagaaataattaacgaattacggaaaggtatcactcattacctttccgtaatttcatcattttttagttttttaaaagattccttactttctatactttggagataaatccactccagatttttcatcttctcttttctagaaataaaaggttttgtataaatcctatatgatgcatatcaaacccattagtaattacttttctccaattttcttctcctgcttttcctgctcttttcccctcagccttatgaaatattatcatgtcctatatttaagggttatacagcgctcgttatcattatttacaccttttttgatgttttttcttattttctggacagtaaatgggagtaaagagaccttgaccactcaccaagataagtaaaataaaaaacgaagggcatcaaactagacgacttactataagtaagtgggcagtaacagacaaatttctgcaaataaaaaataccaagagtgtctaaacccttggtatcattgatgcggccgagaggacttgaacctccacgggttattcacccactaggccctcaacctagcgcgtctgccattccgccacgaccgcgtgctatgaagctgtctttccactaagcatataaactagtgatgatgatcagcactttgaaaagaaagtgcgggtgaagggactcgaacccccacgtcgtaagacactagatcctaagtctagcgcgtctgccaattccgccacacccgcgtgacaagtggtgagccatgaaggactcgaaccttcgaccctctgattaaaagtcagatgctctaccaactgagctaatggctcgctctaaaagtgattcaaaattttaaaataaaatggctgggctagctggattcgaaccaacgcatgacggagtcaaagtccgttgccttaccgcttggctatagcccaacgaaggtaaatggtgacccgtacgggattcgaacccgtgttaccgccgtgaaagggcggtgtcttaaccgcttgaccaacgggccgtctggttgagaacttatctggcggagaaggagggatttgaaccctcgcgccgcttacgcgacctacacccttagcaggggcgcctcttcagccacttgagtacttctccatatggctccacaggcaggattcgaacctgcgaccgatcggttaacagccgatagctctaccactgagctactgtggaataatcagactttctttattataaatgatgcgacatattgtgtcaagaagcaacatttatttttttaagaaagtgtcgttgtctctcaacgacttttataatttaacataaaacattaaaatgagtcaagcctttttaaaaaattcttttgatttttcctctgcactttccgcaggcatatctttccggattcattgcccgcttctttatatactgttggccgcaagccgcgcatctatacatatatgttttcttttgtgtctttttgatttggagcggcgtgcagaatctcggcgctccgactttctgaagcagttctctgaagtctttgtctctgtgcttgtacccttttccttcaaggtgaagatggtaatggcacagctcgtgtttgatgatgcctaccagctcgctccgtccgtgttcgagcagatattttcggtttaattcaatgttatgagaagacagcatgtaccggccgcctgtcgttttcagccggtcattgaagaaggctctgtgacggaacggctttccgaaatcttgttcagagatgtcttccgtcagcttttgaagttgttcgttatccataagtgcaccccgctttaaaaacattgaacgggacaattcaccgttcgcatacaatgagttaaaaccgacctctaactaaaagctgaggaggaatgagccatgccgaattggctgatgaaacaaatgcaaaaagcgtttttagaaaaggacaattaccaaatcaaactgctgaatcagtgctggtatttctacagaaaaaaacactgctcgtaagcagtgcttttattttaccatagacagcgacactctgcctttttgcacgtccaccccttcaacccatacggtgacgatgtctccgaccgatacgacgtcgagaggatgtttgacgaattgattgctcagttttgaaatgtgcacaagcccgtcctgcttgacgccgatatcgacgaaagcgccgaagtctacaacgttgcggacggtgccctgcaattccattccttcctttaaatcctcaagctgcagaacgtcttttttcagcaaaggcttcggcacttcgtcacgaggatcgcgctccggccttgtcagctgcccgcaaatatccgcaagcgtaatttcccctataccgagctcttcagccgtttcagacagcggcaatgcgcttattttctcttttacgtccgcgcttccgatctgatccgcagtgagctgcagttttttgagcagcgcctttgtctctttatagctttccgggtgtatcccggtgcggtcgagcggctccggtcccccgggcactctcaaaaagccgatgcactgttcatatgtttttgcgccgagacgcggaatttctttcagttctttgcgatttgtaaatttgcctagttcatctctttttttgacgatattgccggcaacggttttggataacccggctacatattggagcagcgcggctgaagctgtattgacattcaccccgacttggttgacgacggtctctacgacaaaacggagagattcgtttaattgcttttggctgacatcgtgctggtattgcccgacgccgacggatttaggatcaatttttacaagctcggccagcgggtcctgcaacctccgcgcgatggagacggcgctgcgctcttcgacctgaaaatccggaaattcctcacgggcgatttctgacgcggaatacacgcttgctccggcctcattgacgatgacataataaatgtcacgctctgtttctttcagcacatcaacgacgaattgctctgtctcccgtgatgccgtgccgtttccgatcgccacaacctcgacttcgtaccgatccagcaattctttgatttttttccgggcttccgctgtcttttttacgggagcgtgcgggtaaatgacgtcgattttcagcacttttcccgtctcatcaacaactgccagtttgcaccccgtacggaaggccggatcgacgccgagcacaactttccccttcatcggcggctgcagcaggagcttacgcaggttttcagcgaaaatatgaatcgcctgcgcgtctgctttttctgacagctctttgcggatgtcacgctcaatagccggctggatcaggcgcttgtaactgtcctcaatggcttctttcagcgtttctatcacaggcgtttcacggtgtttgataatttgcttttctaaataagcttttatctgatcggcgggcggttcgatcgcaatctttaaaatgccttctttttcaccgcggttcatcgcaagcactctgtgaggaacgacctgttggatcggctcttcgtactcgtagtacatttcatagacgtttttctcgtcatcagcggctgacttgcctgccgcggaagtgagaattccttttttatacgtttcctggcggatccactttctgaaatgaggatcatccgagatttgttcggctatgatgtgcttcgcgccttcaatggcttcctctcttgaagcgacttctttttctgcactgatatattggtcagcgatgtcgtgaaagcggttttctttcgggagagaaagaatatagtccgcaagcggttcaagacctttgcttttggcgacggtggcttttgttttccgtttttgtttgaagggacggtataaatcctcgacttcctgaagcttgaccgcttgttcgattttttgcttcagcccttccgtcagcttgtcctgctcagagatcaatctgatgacttcttctttccgctgcgtcaggttttgtatgtattgccaccgctcggagattgcctgaatctgcacctcgtccattgagccggtctgctcttttcggtaccgcgcaataaacgggacggtattgccgtcttccagcaggcggatgacactttcgacatgtttttgggataacgctgtttcttcagcaatttgttttttcaaaagggctaacgtttccatatcacaaaagcctccatctcttcattctttctctagtgtatcaaaaaacggcggaacataaaaaaagcagccttacgataaaagctgccctagaatataggtcaaatcatcacgtctggatgttgtgtacggatgaagtgattttgatatatcttctattgagtgtccctgctttaagcaggtgcgaatatgcggaacctcaagcccatccgtgtagatgatgaacctcgcccctttttcgtatgatgacgtatacgttttgtatctttgcggtttgcctgagaggtaacccgaaatcggcagcggatgaaagacttcgcctgatggggagtgcaggaagaaacggacattgccgatcgagcagtatgtcaattcccttttgatgaaattgatttttaagatggaggcagtcgcccctcttttgtttttcatcgcttgattgcagcgctcaatgatgctttccacatcctcatccgcatacgtttccacgatgtctttaatggctgacgaggattcgttggcaagagatccgctgccgagaccgtccgctaccgcgcaaactaattcttcttcattcgccttcataaaaaagctgtcgccgcatatggacttgccttctttatttaattggtatacaagagtttgaacatgttcattttcttcaacctgaatcattacattagctccatggagggatctccaatcaaggcctctctcagttttttcaccgctttccgctgcaggcgcgagacgtgcatttgagatattccgagaatgtcccctgtttctttttggcttttattttgcacaaatgttagatcgataatttgtttttcgcggtcggacagcacatgaagcacgcttttgatcatcatctgctggttgacgcgttcgtatccttcctcctgcgaaccgacgatatctaaaatcgtgacggtgcttccgtccgcatccgcttcgatgctgtgatcgacagacagcgcctgatagctttttcccatctccatcgtttcaagcacttcctcttctgacacatcgagaaaggctgcgatttcttcgactttcggcgaccgctgcgtctctgtcgtcagctgatccaccgccattttaatgcgcggcccgagttctttaatccgtcgcgggacgtgtacgctccatgttttatctctgaggaagcgtttgatctcgccgatgatggtcggaatcgcaaatgcttcaaaggatttgccgacctcgggatcataccgtttaatggctccgagaagtccgatcatcccgacctggcggaggtcttcatgaaaactttttccttttgaatatttctttgccagcatttcgacgagattggtatacacctcgacgagtgtttcctgggcttctttattatcatgtgtttgaaagtcgcgtatgagccgatcaacttcatctttagttagtttcgtagtttttgatggttgtgccatgatcaactcgctccccatttaaatactttgtcatcgccacggttacgccagagttgctttgaactttgacttcatccatgagcgtttccattaaatacagaccgagccctccttctgacaattgatcgactgtgtgcgaaggagtgtacggcccgagatcctgctgcttctgatcaaaatcaaagctgtctccctgatcggcgacaatgacctccagccgatcctcaaacacaccgaaccgcacggatacttctcccttattttcatcgttgtatgcatgctggacagcgtttgtacaagcttcgctgacagcgatttttaaatcttcaatgtcatcataggtatagcccattctgcttgcgacccctgataacgtaagcctgacgattcctacatattccggttcggccggaattttcatctctatataatcaactgatgtactcattgcacgccaccttctgactttgccgaaatgtcgatgatgtccttaagccccgtaatttcaaacagacggacgagccggtcggaaagattctcaagcttcagagagccgccttccttgctcaccgttttaaacacgcctacaaaaacgcctaaacccgtactgtccatataatttacatcttttaagcagattctcatatctttcccctcgtttgccaggggcatcagcttttcacgaaccgccggagctgagtatacatcgatttctccagcgatattgatttgtatatctgaaagattctccttcatatctaccgttaaattcatcgtatcacctctgaaagttatccttactcgtgctaatggctttttacccgtgctgctgtttttttaaacctttctttttaaaacaattaacgtaaaatcgtcatgaagctgaaagtcctggagtctcagcaggctgtcgtaaatatttttgaccatatcctgcgcggagcagtccatgtgttcttccagcatgcgctgaatgtcgctgcgttctaagaaaccgttttcggtacggcattcggtgacgccgtcagaaaaaagaacgatcatgtctccttcgtccatgtgctgttcatattggctgtaatcaaaatcctgagagattcccagcaccaatccttttgcctccagatcataaaactttttttctttttcagagtagtagaagcccggttcatgccccgcagaggcatatgtaaattggtgatttttcgtattgtagtttgcgtaaaacatggtgataaacatgcttgagtccacgttctgttctacaacgcggttaaggtttttcagcacttgggaggggtgaatgccgatctccggaagagagtccatggcatacttgatcatcgacatgcacaatgcggcgggtattccttttccgatgacatcggctatcgcgatgttaatcgattccttgtctttgacaaagtgataatagtccccgctcatctgtttggcggggacgctgatcgccccgatatccagctcttcttcttcaggaatttttgtacccagcagcgtctgctgaacatttgcggcaatttcaatttccgaacgaagctcctgctggatatctctcagactttgatgttcctgataagccatcccgtagccaatcatgacttctattaaaaaatccagcgaatgaaaaacatcttccggcagatccggatacagttcctttactacttttcggtggatgctgataatctcctccggaggaacctgatgttcaatcgtttttcggctgaatttttgggcttgatataaagatgtttctgttaattcggctatatatcggctaagcagctgatgataccgctgctcaataacctccctgaaatccacgttctaacctcctaccgaagccatttcacggcttgaatctctgttccttcctctgcaacagattgcaggctgaattcgtccatcagccttttgacgcccggaagtcccgctcccagtccgcctgacgttgaaaagccgtcttccatcactttacggatgtcggggattccgggtcctttgtcttccgctataattttaaggccttttttccctctgtcgtttacttgttctatgctgacctggcccttgcctgcatataagtaaatgtttctggccaattctgagatagccgtcgtgattctggcctggtccaccgtgccgaagcctaattccttcgcaacgttgcggccaagctgtcttgcggctacgatatcccattctgtcatgattttcacacaggattggtcgttcatcgctattcccccaattcccgcttcaatgtctcaagcccttgctctaaatcgagcgccgtttcaatttcctcaagtgagattccgagttcaatcaatgtgaccgccacagccggctgaattcccgtcaatacgacctttgcgcccatcaatttagacatggtgatgacatcgccgagcactttcgcgataaatgaatcgatcatgtcaacggatgtcaggtcaatgacgactccgtttgcgccggtttcatagattttgttcagcagatcttcttgaaaatgcaaagctgtctggtcgtcaagttcccattggatggataccaataagcagttatacagtttcaggatcgggatttttggatgtctcacaatgttattcccccaatgaaacgatttttcgatttgtcatttcaagcgctgtttgaattcctttttgaagggtattcttcgtaataacctgcgacaaatcaattcccagattaacgatcgtctgcgcgatttccggacggattccgacgagcaggcatttcgcgccgacaagccgcaccgcttctgatgcctgaataatatggtgcgccaccatcgtatcaacgaccggcacgccggtaatatcaattaatacaacctgtgaacggtgcttcacgacgccgtttaacagattttccataatgtgctttgcacgctccgtatcaatcgtcccgacaagcggcatgaccgttacatgctcaaataccgggatcagcggagcggacagttcctgaagcgcgattttttgcaaagtaaccgttttttcccatgagatagaatactgatttaagatttccgtgttgatcggactgaaaaagctgtctatctccaatatcaattccgctctgtcctgatcggccatattaaggtcgaccatcgtttcgtaaagcagcttccaaaactctgacagggtggctgaaagaagtttcagtgacaggccgagctgaacggcgcgcagtgcgaggtcgctgatctgctcttccgcagcctcgtcatttttagtcgataataaaagaatgtctatatagtctttacaaatattttcacatatgtgattcgtaagctgatagtcttcctgattgcctacttcttttagtttggctgtccaagtatcaagcagttcatcatgctgatcaatgataaactgatacactttctgattcgacatgggtttcactgacctcccgacacaaaacaacaaagtttgtttgattatctctttattatagcgcttatgtttttcgaaaacaaaaaaagttgctctttatgagcaaccaaaatatgactaaaaatcaatgagtgccaaactgatttgcaaggcttcatcaaccttatccatcatttcatcatccagatgagttattttatccgttaatctttgcttgtcaatcgtccgaatttgctccagcaaaataacggaatctctttcaaaaccgtagcgttttgcatcaatttcgacgtgggttggtaatttcgctttctgtatttgggctgttatggctgcaacaatagcagtcgggctaaagcgatttccgatatcattctggatcactaaaaccgggcgtacgccgccttgctctgagccaacaacaggagataaatcagcaaaataaacatcgccgcgctttacaatcaaaatgattatcctccgctgactaagcgctcaacggtcgtttctgcttcgcactcagcatagtgagcctcagaagagatattcaagttgattttcgccatttccatatacccgcgtctcatcaaatcacggttatggcgagttgtccgttcgctgacatacgctctcactgcttgtgatatcagttcgtttctgcttcgtttctcccgcatcgctacaccatccaattcagctactaagttttcgggcaagctgattttcatttcggttcttgcgctggattcagacaaaaaacatacacctccaccaaacttacggatacgaccaattcatccatccagacataatgataccattattcaaacgtcaagcaaagctgttttataaattctctttttccggatgacggctacttgtttgtattatcttgcagtaaaggatttcttacttccattatactctcattttccaaaaacatacggggaacgcgggaactaatggtacaagggacctcgtaattaatcgtcccaagccgcccggcgatttcatccatcgtgatcgtttcttccttctggctgccgatcagggtgactttggtgcccggcggataagattgatctaattcgaccatcaattgatccatgcagattcttcctgcgatattcatccgtttgccgccgatcagcacagacgtgccgctcagcttgcggagccacccgtctgcatagccgatgggaaccgttccgatccattgatccttctctgccgtatatgttgcgccgtagctgacgctttcccctttgcggatctttttcacatgggataaaacagagtgcagcgcaaaagccggctttaattgaaacggaatttcgctttggatgtcagcagaaggacgaagcccgtacatactgatgccgaaacgaaccgcgttaaagaagccctttttaagacgaagtccggcagcgctgttcgcgcagtgcaccatcaattcttttaaagggagcggagcgatcaatattttaaagcggtcaaactggaagaggaaataatctctgtttttctcatccgcggtagcaaagtgggtgaatacgcctttacagactaaaccgggattttggctgaggatttttaacacgctttggatttcttcctccgttttgactccgagtctgttcatgccggtgtcgactttcagatgaaacggcactgtttcacttccgaggtggcgcgcagcttcctgaagccattcaacagaataccccgtgagtgttacgtcatactcggcagctgcttgtacatattcgggcggcacggcgccaagcacgagaatcggcgctgtaatgccccgctttctcaatgaaatcgcttcatccagtatggctacggcaagacaagaggcacccgcttcaagcgcggctttcccaacttccaaatctccgtggccgtaagcgttcgcctttacaaccgccatgagatggacgttttgcccgatgtgttttttcatatgcgtgacattttctttaatcgcggacaggttgatttccgcccacgtttctctgtaaaaggatgctgtgttcattcgatacacttcctagcattattttcaattcatattgttattatcatactaaaattattctgcaaagtgaaatggaatcaaaaaagagaccgacagcggcggcctcttttttgacgttattttgacgactgtccctgcatgcttttggcggcggccaccatttcatcttttgtcagatcctgtgatgacagaagataatccactccgtcatatgtccacgttaaagacgtatcagataatgcggccaccgtgaagccgagattaaccggttcgcctttcagcgtgacggcagaggcggcttttgcgatatgggctttttcttgaataagggtgaatgatttttctccgccgtaagtcatgacgatccgtttgccgtccgccgttgaaatatctttctcttcaagctttttgacgccggccggcacttgaagcggtgttttgaccgcaaatgaatcagacggcttggcgcttgtggcgacgtccatctgagaaagcgtcatatttttcttctcgtcaaaagagtctttatcgaacggcttgttgaattcaaagcttttgaattcgacttttaccatcactttccggtctgtatccatcactttgacgagcgacgggctcatgtcctttttgttgaaagtgatttcctgagtcggcagcattttgttgtgctgatagtttgtttttgtttcaaacgtgtactttttatctttggcggaatagacggcgtctttgtcatgctgcacgtcctttacaagtgactcaaacaaatatacttggctgctgttattcggccagtcgctttggaatctgaagctcttatttaacgacggcgtgaggacaaagactccgttggcgttccgtaaaatgacttggttttggtcttttttcggattttccagatagacccggtacagggaaggctttttatgccagatttccacattgtatacttgcggatcactccccgtttcaatggtcattttggctttcgctttgtacgaggtgtattctttcgccttcttatctaaaccgttcacgatatcttcctgtgatttttggccgcaggccgaaagaataaggacggcaagcagtcccgttaaaagcaaaacaaagctttttctcaccttttttcaaccccttcttctcaattgatgtaaagggaagaaatcgcttgtttgactttaacggtacgccctgaacggacggacgcgtaccataaaagcctcaaacaacttgtctcccttaatgcactatcaaatatatgaaggggttccggctaatatgcagactagcgtgacaacctttcaatcacgacctgtgccgcggcgtattcttttgtatgggtaatggagacgtgaatcgccgcgcagtcaagcttggcgcaggccagcacaggctttcccgctttgtcgtttccggtttcaatatcctgaaagctgagctctttgccgatacctgtgccgtatgctttcgaaaaggcttcttttgccgcaaatcttcccgcgagaaattcaattttccttttgtccgacagcaatgtaaaacgggcgtattcagcctccgtcaatattctttgcggaaacctcgcctgccggctgagcatgttttcaattctgtgcagttcaacgatgtcgattccgattccgaaaatcatgtgaattcctcctaaaagtccgtactaaaaaacggtttatgtcataaacgtgttactatatatgtaacaaatcagatgcaaaggggcttgcgatgtttatacgaacggaaaatttccagacttttatcagacgttatccggccgtcagctgtattttggcgctgcaggcgttcttgtggctgtttttcagtatgccgcttcattccgtcatgatgtggtcagatgctgtgaccggctataattacggcgtttccacgggagaatggtggcggctggtgacaccgatgtttttacacgcgaatttcactcaccttttgtttaactccatgtctctctttttattcgcgcccccgcttgagcagatgctcggaaaagtccgttttctgattgtgtacatcgcatcgggcattatcggcaatatcggcacgtatcttgccgaaccgcttgattatgtgcatgtcggcgcatccggcgcgatcttcggacttttcggcgtgtatgtgtttctgactgttttccgcaaggagctgatcggccgggatcagtcgaaaatgattatgaccctgcttatcatcgcggtgctgtcgacgtttatcaactctaatattaacattatggcgcatttgttcggactggcaggcggatttttgctttcctttttatgcgtgcagcaaaaaaagcggcggtattaaccgtccgctttttcatatgaataccagcgcccgatgcgttcggcatcttcctcgctgacatccttcagcatgacatgctccatgtggtgagctgatttcactgcggtagccacagatgcgagccgccttcttttttgcagaaaggagcggctgacttcaaacatctgcattcttcttctcagcataatcgtggtcgtcttcccgatcagcctcgtggtgatctgaagcctgccgccgtttatgcaccatgacgctgtcctaaacgaggcatatcctagcaccagttcgacaggaagcacgaggagcgatgcatatccccacggcttaaacagaatacaaagcgggatgatcacgaaaatcgagaagattatggagcggaataaataccggcgcagcgcccttttcggcaaatgattccggttttcctccagcacgtaatccggtgtgaaaccgttcagcatcactccgagctttgatttacggatgatcggaaacagaatcgtctgagctccttctttctcattccctgcactgccggcgctgacaatcgcaaccgtcgcgtatccgaataattgcctgatcacattttctttcattttaatggcttggattttacggagcgggattgtcacttgatgcttttcaataattcctctggtaatgaccaattcgtgttcctttttttctattttaaagttggcatgcttgatcatcataccggcgatgcttaacagccaggcgatgaacaatcctatgaaaatgatcacggcgtatatgccgatgctcgcatgcttgagaaaggaaaacctgtcatagagccagtccatcggaagtacttcatcaatctgagaaaagagggcgaataccgctgagatgatgacaccgattcccccggatgttgaggcggccataagcagctcacctacagacaggcggtaaacggattgcacatcttccccgcgcatcggttcctgctccgctgcggtctcccctcgttcttcttgctccgctttttgctgaaaaacagccgctctgatccgttccgcctcttccacagtaatggcggataagacggcttcagcgtttttcccgtcgccggccgtttcgatttgaagcttaacaagcttaaaaagctgctgaatgatgccggcactcgtattcattgattgaatccggtcaatggagatgtatctctttttcgtaaaaaacaagccttcttcaattctgaattctccgtcctcaatccggtatgtaaattttctccactcaatcacactagccgtaatcagccagataagcaggacggcgagcgcaatgcctccgtaaaagcgaatgaagtggttggagtttacaatatagacgagaaaaaatggcagaataatgtttttaatggtttcgataataatatggaataagttcaaaatcacggccgccggatgcagacgtttcggctcagacatcatcttccgtcacccttgccagacgggaaatggaatccctcagccggtcagcttcctccatatcaagcgccggaatggaatgaacggttgccgccgtggagattttgactgaggccagacggtaccttctgaggagcgggccttgtgaagtatctacgtgctgcaccctcaccatcggcacaatgacccgtttgacaataaaaatgccggattgaatatcaatttcattttcatggacttcatagcgccagatcctgtgcctgattttcggtatggcatagacggatatcactgaaccgaatatccaaatgatgccgaggactccggtgatccaatacggccaatggaagaaatggcttaaaacagctgctgctataacggccagaagacagaaggcggacaggatgatttcctgaagacgccagacttttaagccgcttggactgattcgattttttggctgtgctctcaacatacctacctcccattttttatcatacatacaaatacggctgatttgcaaaaaagattcactttccggcatatcaaaaaaaaagcggacccccgtaaaagggtccgcttcctgtgttttagtatgattttttctggcgtctgtcacctgaagaacggcggtcgcttgagcgttttttatcgtaggaagaacggttgttgtttttccctttgccgccgcggtagccgccgccttgaccgtctctgcgcttagaagtacgctggtttttatagcgtttgctgaccatcggcgcttcatcagtgaggcgtacaggcgtgctgtccggctcttttgtcgccattttaatggctgcagccacaactgtcactgcatcatgatcttctaacaattccgcagctgccgtcatgtagaagttcaggttgttttcgctgatcgccgtgcgcagacggtcaaccgtcacctgctgctgtccttctaatgcttcgtcaagcgtcggctctttcatgcggtccattttgcgttttgtcgtttgttcaatcgcgcgaagcatgcttttctcacgcggtgtgataaacgtcatcgccatacccgtttttcctgcacggcccgttcttccgatacggtgaacgtagctttcaggatcttgaggcacgtcaaagttgtaaacgtgggtaacgcctgagatatcaagtccgcgggcggcaacgtcagtcgctacaagcacttcgatcgcaccttctttaaatttacgaagcgcaaccatacgtttcgcctgcgttaagtcgccgtgaattccttcagctgcatatccgcgaaggttcagggcttcagcaagctcatcgacacggcgtttcgtacgtccgaatacgatcgcaagttccggagactgaatgtcaagaagacgagtcagcgtatcgaattttttgcgctcctgcacttccaagtagaactgctgaatgttggacacagtcatttctttcgcttttacttttacgtgttccggctcagtcatgaaacgctctgcgatccgtttgatcggcgcaggcattgttgctgagaataagagcgtttggtggtcgctcggcacgtttgagagaatggattcaatgtcatcaatgaatcccatgttcagcatttcatcagcctcatccatgacaaccgtattcacgttgtttaaacggatcgtgcggcggttgatatggtcaagaagacgccccggcgtacctacgatgatatgcgggtttttcttcaatgcgcggatctgacgtccgatatcctggccgccgtaaataggcagtactttcgcacgcttatcttgtccgattttatataactcttcagatacttgaatggctaattcacgggttggcgcgattacgattgcttgaatattaggagactcggggttcattttttcaacaaggggtataccgaacgcagctgttttacctgtacctgtttgcgcttgtccgatgacatctttatttaaaagtccgagcggaatcgtttgtgcctggatcggtgttgcttcttcaaatcccatacgattgattgatttcatgagatcagaacttaattggaaatcttgaaacgttatagtcaaattattcaaactccttctgattgctgtttcagtaatgtcgtgatttaccactaaaaaccgccctttcatccaaaggacaggatcatacgtatacaaagcccgaattactttacgtttaatcttaccattacactatgtgtttttcaataaggcgagatggtcaggcggccggaagcggcctgaccggattcttcccgcgaacgaggccggaccccgcgccggacgggatttcccagccggcggcctttctttttcaatacggacagaattatttcaccctgaattagtttcttcatttttgtatatttttataatgctgatcagtattttttcagttcttctctaataaatctttaacgatttcttcgagcttcatacctctcgatgctttaaacagaaggagatcgccggaagcggccatttcctgtatggcgtgaagcagttcttttttgtcaagataatggctgacgcgcccttcttcaaaatgccggcgcgctccgtcagcgatgaatgcgccgagtgtgccgtaagtaaatacatggtcgatttccgccggattgaccgcagctccgcattcttcgtggaatgctttttcttcatcacctagttcaagcatatcaccgagcacgagcattttcttccgatagcctttcatcgtttcgattaattcgaccgccgctttcattgacgtcgggctcgcattatacgcgtcgtttacgatcgagatgccgttgtccgttttgaccagttccaatctcatccccgtcaccttcaggcggctcagtcccagagcggcattttcccgcgtaatgccgaaatagatgccggcggcgtatgcggccatggcattcatcacattatgtctgccgagaaccggaataaagaaagaacggtcgattccgtcgatattgaagtacgtgccttcttccgcctgttttatttctttcaggcggagatcattgtccgcgcctgcgccgtatgtcgttgtccggcaagtgtacgtcttttcgcgaagcagcggctcatccccgaaataaaacagaacgccgtcttcccgaagtccgtttataatttcaagtttcgcctccgcaattccttctcttgagcctaaatcctgcatgtgggattcgccgatattggtaatgacggccgcttccggttcagcaagacggctcagaaaatcaatttcgcctctcgcgctcattcccatttctaaaacggcgatttctgtatcttcaggcatggcaagcacggtcagcggcaggccgatatggttgttgaaattgccggcggttttgtgaacgcggtactgcgtgccgagaacggcgtgaagcatgtctttcgttgtcgtttttccgttgctcccagtcaccccgataacccgtgtgccgagctctttcaaataagcttttgccaatgtttgcagcgcctccagcgtgtcatcgaccaggatgacagcacgctcttccggcggattcggttcagagcggtcccacaacaccgcggaaacgcctttttcaaatgcttgcggcacaaaggtgtggccgttaaaatgctcgccttttaaaggaatgaacagctgatttttttccaaagtccgcgtatcggttgcggcgccctcaatcattgtttgttcaaatacgggatttgtcagtgtgcctttgaccatatctgcgattcgttttacagttcgctttatcaaaggtggcacctcgctttctgaaaatgttgtctgttacgggaaaagacactgccccttcaggcagtgtccgtcttcattaaaatgtatgtttaatcagctgtttttcggcatggcgttcttttgccagctcaaccagctgttcgatcagatcactgtaatctacgcctgcttctttccaaagcagcgggaacatgctgaatggcgtaaagcccggcattgtgttcacttcgttaatgagcacttgaccgtcattggtcaggaagaaatcggcgcggacaaggcctgatccgtcaatcgctttgaaggctttaatcgccatctcgctgatttccgcatattgttcatccgtcacttgcgcgggaatcattaaatccgtgtcgccgtcttcatatttcgccttgtaatcgtaaaagtcggttttcggcgcgatttcaccgacggcggagcatttcggttcgtcatttccgagtacgccgatttcgatttctctgccggcgattccttcttccaccacaattttccggtcatactcaaaagccagttcgaaggctttttcaagctcttcacggtttctgcatttgctgattccgacgcttgatccgaggttcgccggtttgacgaagcatggatacccaagctcctcttcaacctgctgtaagcagctgtccggcgtctgtttccagtccttttttaagaaagcggcgtacttcgcctgcggaagccccgcttgagcgaacaaatgcttcatgatgactttatccatgccggctgatgatgcaagcaccccgttgccgacataaggaacgttcagcaattccagcagaccctgaatggtgccgtcttcaccgttcggtccgtggagaagcggaaatacgacatcgatcggcgccttttcgtcaggcgacgcttcaggaaacatttcccggttcaatgctgatagagcgaaactttcaccgttttgttccagctgaagcattttcacgttggaaaccggctcagtcagcagcgggcctctttgccattctcctttttcagtgatgtaaatcggatgtatatcaaacttctcagtattaagcgcttttgttacagctaatgctgtctgcagcgatacattgtgttcggctgactttccgccgtacaccaatcctagacttgttttcaatggatattccccccacaacaattcatctttactatcttatcactttcctcagaaaatgatctaattatttttgggcattctgaatatgaaagcatttgtatgtaattcctttttattttatattaaaatggcatggaaaaggagatgtgtcatatgaaaaaaatcagtacaacagaacaatttaatgaacttattcaatccgacaaggaaatcatcgtgaaatttttcgctgactggtgccctgactgcacgcgcatgaatatgttcatcggcgatattttggaagaatataatcaaaatgattggtatgagctgaacagagacgagctccctgagcttgccgacaaatatcaggtaatgggcataccgagccttctgatctttaaaaacggcgaaaagaaagcgcatcttcacagcgcaaacgcgaaaacgcccgaagaagtcacagaatttttatcacagcatatttaattcgtttcacgatctttgtttatgacttcaggctctacatgaacatggacatgagtcacatcatgttcatgttttattgcatattcgacctcatcggctacttcgtggccttctttcacagacagtcccggatctaccgtaatgaccatttccacatgaaccgtgctccccaaataccttgctttcacatccttcagcctgctgacctcttttatttctttcactgtgtgtttatacggctccaaatctttcagatcaaatccgtccgtcaatgagtgggatgcatctttgaagatgtcccatgccgtcttacagatgatgattccgatcagaaaagcaataaccggatcaatccacggcagatgaagccgggccgttaagacgcctataaacgccccaatactgacataggcgtcagaacggctgtctttcgccgccgcatgaagggcagaacttttaacccgatccgcaagtcggctgttatatacatacatgccgtacattacaatcgcgcttccgagcgccgtccatgccgcaatgaagctcggctcggcctccgttccgctgacaatcgcctttgctcctccgatcagcacttcaataccgaccgccatcataataaaagacgcaattaatgaagaaattgtttcagcccgataatgtccgtaagcatgatcactgtccgcggggcgctgggaaatccggagcccgatcagcacagccagtgatgcgacaatatccgtggcattatttaacccgtccgctctgagcgcttcggaatgataaataagaccgatcaccagtttgacggcggcaaggatgaggtacgcggcgatattaagaatcgcgcctttttcgccccgttttaagtttgccgtttgatcattcatgtaaggactcctccattctcattcatagtatggatggaaaagcggaaaaatagcagctttgatcagagcaaatgcaatattcgacagtattattccccgggaaactttttgtcgaaaaattggcggtatttttcctttacatatgaatatgcccattgtatactttcattaaatgataatgattctcaatatcattttattaggagggtaatcatgaggtcttctcctcagctcggatcatcagttgaaggacgaaaaaaacatctgatccatttgctgatcaataacggaatatacaaaaagtcggaacggcatttatatgaattatcgctcggagaattagaaagcgaatacaaatatgtaaggaaggtgcaggctcatggcgaaacgtaaaataaaaacatacgaacagctgataaaagaaaacaaggcggccattatgaataatcaaaagctgatgaatgtgatctatgacagaattgaccgcaagcatcaaaaactgctccggcacaacagccatacataaaaagagccattttcaggctcttttttttattgctcaaaggcttccgccgctaattttccgatgaccgcatcgtccatcggcggattgtgaaggccggcccgggcatcccgataataccgctgaagcggattgtttcgctccaggctttttgcgccggtgattctcattgctttatcaacaacagaaaggacggcatttgtcacaatatgttttgccgcgccgagctcgcttttgatgaaagggcggcgtttcgggtcatcatacatttgcgccgccgtgaagagaaactgtctcgcttttaacaattcaagctccatttccccaacacgctgcccaacggccggcacgtctttaatcggtccgttcaggctgttcggcgaatattcggatgcaaaccggacggcatagtcccttgccgcttgagcgatgcccagataagcagcgggaatgtgaagcagccagccattcactttcgccgctctcggcccgctgataagctccacaagccgctcgtcacggaccgtgacatgatctaaaaggagatcatggcttccggtcgccttcatggcaatcatatcccatgtttcttcgactgaaacgcctgactgatctttatgaatgagaaaaacaccggacgtttgtttttcttcaatccatgccgtcacaagcatataatccaaagtcagtgaaagggttgtaaaggtttttcggccattcagcacccattttccgtcttttttgacagcggaggtgccgggtcttcctcccctcgtcggactgccggtctgccgttccgtcgctgccctgttcaggacagctccctttttcacctcttctgtgataaatgaaaagacatcttcatcccagctgtttccttctccgagctcacccatgacggataaatgccagccgattccgagagcaacggccgcgtctccccgcgccagccgttcctgaaacagcaccatatcataaacggaaatgcctgcaccgccgaatacctcaggtaccgttaacgccgtatatcccgcgtcgcgcagtctttgaattttctccgcgggaaaacggcccgcctcatcatcaagcgcggctgttttttgaaattcgtctgcaagcaggccgattttttccatccattccctctgccgttcattctgtatccataaagacactggaatccccccattataattccgataaagttaataagtattatagagattcaagtctcgtttcgcaactgtgaggctgtacaaaaaaaacacgctattccatggaatagcgcgttcaggctgcttccgggccgcggtcctgcttaagcccgagataaatcagcatatatgtgagataacccatcgtcatcacaagcccgccaaagaaaaagcttgaaaaaatcggctcttcaaacgcggtaaccgccgcaagcacgatccagcttgcatacaggtagatgatgaaataacggaatcccgacttcattttatataagagaaacagccccactgtagaaaacaaacccagcgcaagcctgaaataaacaagatgttcgaattggaacatgaatgacacaaaggaaaaaccaagcaataacacaatcggtaatgcggtaataaaatttctcaagtgagcacctccgtcattacctttattataaatcaaaatagcataaattattgatttatcgtgatctttttcacaaaaatgtcattcctttactttatacccgaacatcgcgtttgcaaaagctccaccaagcgacggctaagaagaatacaatatggataatgataatgcctgcggaaaataacggcgtcattcccgcaaacagcggtttcgccccgctcatatattgcgtcaggtcagtatttgcgaacagcagaaaacttccccatttgttttggaagagcgacataatcgtcacgagtgattttgcgccatacagcacgataaatgacaaaatgacggccgttgcgctgtttcggaatacagaagaacacagcaagccaaagcatgccatcgcaaacgcctcgacccagttcgtgccgattactttcagggtgttcataagaagcgtccctgattcagatgtcaccgacacgccgaagaaagccatgccgaacagcagagacagaatatagtacgccgcatacaggtacaagctgaccaaaaatacggtaatgagtttagatacaaaaatccgctcccgctttaccgggcggattaacaaaaatttgatcgttttcttatcaaattcagcggaaatgatcgttgccgcgatcacgatcgttaatgcctcaagcagaatattcagcccgggcgcgtacgccatatagccgatgaaattctcatccgttccggaactgatgacaagccgtttaatgacaagcgccataataaattggagaacggccatcagaatcagcgccactaatgagacttttcggttaaagagtttcatatgctcattcgctgtcaatttaaacattcgtctccccctcctcttgaagcgccgtcgtcactttcatgaattcatcctccagcgattccgcatacggcatgatggaatacacgagaaagtcttgtccgacgagcgcacggtttaatgccgggatgtctttcttcgctacggtgacggtaatgcccccgccgtttttctccggagcaaattgctgttgggacagccattcgaatgcttcgtcagccggctgaatgtcgaggacggctttttcttctttttcctcagcgccgcgcagaacaacctctgttttgatctcacctttttgaatgatgatgacacggtcgcaaaggtcctccacttcacgcaataaatgcgtcgcaaaaaggatgctcgtcccttcaagctccgcgagttcctttaagtgatcgcggaaatccttcattccgccgggatcaagcccgtttgtcggttcatctaaaatgagcagattcggacggtgaagaatggcctgcgcaattccgagacgctgacgcatgccaagggaatacgttttaactttgtcatgaacggcattggtgagcccgacccgctcgatgacttcctgaagcctgtcctctttgatgtttttgtgcatgttggcaaagtgcttcagattttcccaccccgtcaggtacgggtagaattcaggattttccacgatcgctccgacggattcaagcgctttttcgaaatcagcatcgtgctgaaagccgttaattgtaatcgtgccgctgtttttctttaaaagaccgacgatgattcggataagtgtggtttttcccgacccgttcggaccgagcaaaccgatgatctcgccctgcctgacattcatgctgatgttttttaaaatgtgctttttgcctattgttttgtcaaggccttcaatatgtaaaatcggctcagtcatacagccttcctcctttttcacaaaaaataaacagtgcccgtacataggcactgtctgcattataacattagtcatatattcgtgaagagccggagccgacgttatgtcttatccgggaccgatccgtttttttccttctcttcattattgacgacatccagaatatcaagcaggaacacaaaaatcggaattccgataatcaagccccaaatgccgaagaaatgttccgagaaaatcagaactgtaaaagtaaaaaagatcggcagttccgttttcgctgacatcagtttcggattaaggaagtacgtctcaatcgcatggatgacgaaaatgaccagcacgatgtagatgacatacgctgcgccgcccgtcgtatacgcgatgatgctgagcggaatgagcgaaatcaccacacccgcaacgggaatgagcccgaggaaaaagaccatgattgacaggccgaacagctgcggaaaatgcagaatcgccaatgcgatcaaggtgaggatacagttcaccagcgcgataataaattgggcttcaagcactttgccgaatgttctcgcaaacttgctgccgaaataagcaagttcgtagtaaaaaacagacagcttgctgtgctgaaattttttcataaactccgtgagccgctttttctcgaacaggaaaaacatgctgagaatcagtgacatcacgacctgcaaaccgaaagtgctgatatcggccaagtatgtatacagtacattaaaaccttcttttacataggaaccgatattgatatcgccgaacacgctcgatatctcatcataaaacggaatgacatcgggatgatacgcgatgtgcttgatctgcttaatcagctgttcaatctgcttggcaacaatcgggtaaaagacaaagcctccgacagtcgccccgacagccagcgcaatatataaaacggtgatgaccaccctctggctgatccggaaaaaatggttcaacacgtgccggatgacagtctccagccgatccatcagaaaagtaaaaataaacgtaagcaaaatcaaattaatcatacttcggaatacaactaacaccccagtcaaaacaagaaaaacggaaaaacgtctgacacccggatgctgaaaaaatttaaaaatagccgccatttatacactcctgctaggacaaaaagcccttagatttcatctttcactctctaattgtaaattatataacaaaatgacgctaaggtctttgtccacctcctaataaatttaaacaaatttatcttttttactcatggcggccgaaaaaaagaacggcatgcccgatgcatgccgttcctttccttttataccgccgttttcatttctttaacggcctgtgtgcttttcgcttcgtcaaactcattttcgcttttggctacgatgatggtggcgattccgtttccgatcaggttgacgatcgcccttccttcactcataaagcggtcgacgccgaggagcagcgccagcccctccagcggaataacctgaagcgccgataaagtggaggcgagcacgataaatccgcttccggttacgcccgccgcaccttttgatgtcagcatcagcacgagaatgatcgtaacctgctggccgatggtaaggtcaacgccgaacacctgcgccagaaaaaccgtcgccatggacagataaatcgaggtgccgtccaggttaaaagaatatcccgtcggaatgacaagaccgacaaccgatttggaacagccgtagcgctccattttatccatcatccgcggaaggacggactcagaagagcttgtgccgagaacgatgagcagttcatctttaataaaacggagatagttccacaagctgaaaccgaatagtttgcaaatgatattcaaagcgacaaatacaaacaggaacatcgtaacgtatacagacagcatcagactcgccagcggcttgatggaatcaaggccgaagtgcccgatcgtataggccatggccccgaatgcgccgatcggcgccgcgcgcatgatgtagccgatgattttgaaaaaaacgtgcgacagtttatcgaagaaatcaataatgcttttgcctctttcaccgagcgccgccaggccgacaccgaataaaacagaaaagaataagacctgaagaatgtcgccttttgcgaaagcgtcaaccatatttgacggaacgatgtgagtgataaattcaatccagtcaatcccctgtcccccgttttgcgtgtactgagagacatcccctttttcaagcttgctgtaatcaagcccctcaccgggtttcatgatattgacgaccagaagtccgataataagggcgatggtggtcacgacttcaaaataaataaatgcttttcccccgactttgccgacttttttcatgtctcccatcttggcgatgccaagcacgatcgtcaggaatatgatcggtgcgataatcatttttaccgcattgataaatgtatcgccgagcggcttcatctgcttcccggcctcaggccatacgagtccgacaatgacgccgatgatcaccgccgtgatgacctgcaccgtaagatttttgaaaattttcatccctactcccccttgcctctcgctgcgtctatacaaaaatgatagcgttttcaaacaaagaggggaagcttatgatcataacggacattttggtctttttggtctcggctagcggacgaatttgtagcggttaaccggccggcccactcccccgtattgaatgtcgagcttaatctggccgtctttttcaagaaaatcaagataacgccgcgctgtcaccctggcgattccgagcgctttggcggcttcttcagctgaaagcggctccgtctgctgtttcatataggtcaaaatttcattcatcgtaaaatgatttaaccccttcggcagatcccgggacggattttgcggaattttaagcagcatgtcaagctgctcttgcgacatggtgtcatgctcttcaattttccgtttatattgtttatagttttcgagcgcctgtctcatccgctccagcttaaacggcttcaaaatatagtcggccgcaccgttttgcagcataagctggattgtttctttgtcttttgcggccgagacgatgatgacgtccacttcgagcttttgttttctgatttcctggagtgttttaattccgtcttttttcggcatgtatacgtctaataccacgagcccgggcctcagatcttttataagcctgattccctcgtctccgtcagctgctgtggcgatgacgctgaaccccgaaacaccggtgataaattctttattcacctcctgcaccatcggatcatcttcaataagcagcaccttgatgtccatcgaatgattcctcccccttcatcggaaataaaatagaaaatgccgttccctgtccctgccgtgtgtcgacttcaataatgcccatccctttgtcgacgatttgtttgacgaggtacaagccgtatcccgttcctcccgttttattgacggtaaaccctttgtcataaaggtgcgggatgtgctgatcggaaatcccgcttccgttgtcttctattaatatagcaagcacttcatcattttgctcgatactgatgtcaatatgtttgtcctccgtatccgctgtttcgaatgcgccgaacgcattttcaattaaattgccgagcaggacgacgatgtcatgctggtcgacatgctccggaaatgccgagaaactgctgttttcatcaattttcacagaaatgccaagctcttttcctcttttgattttgcttaacagcagtcccgccgcagcgtcattctgaatggcctgatgaagaaaatcggtgacgctttcttgttctgatgattccttaaaagcaagctggagcgctttttctgattttccgagctgaatcagtcccgcgatggtgtgaagcttgttcatatgttcatgattttgaactctgagcgcatcgacaaaatttttcacacctgtcagttcttccgccattttcgccgcttccgtcctgtcctgaaaaatggcgacggctccgatgaccttctttttcatgacgatcggaattctgctgctcatgatcacctttccgctgacttggatttcttcattatatacggctcggttccgctcgacgatttcagggaggcgcgaatcttttaacacgtcccagatcagcctgccgtctgtctcttgtctgacattgaatatctgcttcgctttttcattaaaaatagtgatgtgatgctgattatcgatcgcgatgacgccctcattcattgaatgaaacgtagcggtccgttcctcatacattctcacgatctcatggggctccagccaaaacatttgttttttgatgtggcgggccagcaaaaaggagccggccagtccgaacccgagcgccagcagaacgataaacagtatttcatgtttcagctgaagaagaatttcaccgaatccgggcagcgttttaccggccagaacgacgccgatctgattcaaatcccggtctttgatgggataaaaagcgcggacggcggtgccgatttctccctttgcttcggaaaaataaatgtgctcggcgaacgccgcggcttcgtcctcaccccttgaacgctttccgatcattgtgctgacgggatgtgaatagcggatatgatccatatccatgacgacgatgtaatccgcttcattgatgatccttatttcttcgaccgcatggcgcacgtcttccctttgttttttctgctccagggcgcgtttgacatcggtcatctcagataccgtccgcgcggtattcatcagccgttttttcagctcgcgctcctctgtatgctgaatatttccgatcagcacgatgccgacgatcaaaaaggtaaaaagcacgacgatatacgaaagtatggtgattttccagcggatggtgagcttttttttcgtcattggcctcttcctttccgtctctttacgaaaacggcccgcccgattatgcttgttatagaaaatggcggagggggttttcgatgaaaagcttgctgacttgtctcagcctgatggtactcggtatcggaaccgctttattcatcggctttcatgatcgtttctcaacggaagaaccgtattatgatgacgaacaggaaggcctgaaagatcaaatcgttttcaaatttagccatgtcgttgctgagaacacgccaaaagggcgggcggcgaataagtttgccgacctggtctatcaaaagtccggcggcaccattaaagtagaggtgtttccaaacgggagcctctattcggataatgaagaaataaacgccctccaaaacggggacgtgcaattcatcgctccctccacctcaaagctcggatcactgtctcccgaatggggtgttttggatctgccgtacgcgtttacaaactataaagccgtgcaagaaggcctcaacggcaaaatcggcacacgcctgttcgcttctttagaaaagcatcatttgaaaggtctggcgtactggacgaacgggtttaagcagcttacgtcaaataaaggaccgatcttcactccggacgatttgaaaggacaggcgctcaggatcatgccgagcagcgtgatcgaagaccaataccgtctgctcggcgcgcgcccgcggcaggattcctttaattccacgtttcagctcttggaaagcaatctcgtagacggagaagaaaatacgatttcaaatatctattctaaaaaattttataatgttcaagattatttgacaatcagcaatcacgggtacctcggttatgccgtgatgaccgacgagcatttctggaattcgcagacagaaaaaacgagaaccatcttaacggaggcgatgagagaaacgacggaatggaacgaagcctccgctgagaaaatgaataaagaccagcttgaagagataaagaagaattcatccattcatattcatgtgctgagcaaagcggaaaagaacacatggatgaaacgcctcgacccgatttacggacaatatgaacagatgatcggccgcgggcttgtgcaggatttgttatccttgcgccgcgagccttagcaggaccaatacgcccatctccgtttcatcccttttcccgccggggaagtaaatagggacagagcaaaaaaaggagatggagacatgtttacacatacgaaaaaactgcagcatccggctaaaccggatcgtcctgacccgctgttcgcaaaaaagatgcaggaaattttagggggacaatacggagaaatatccgtcgccatgcaatatttgttccaaggatggaatacacggggcaatgaaaaatataaggatcttctgatggataccgcgacggaagaaatcggccatgtcgaaatgatcgcgacgatgattgcgagactgttagaagacgccccgctggcagagcaggaaaaagcggctgatgatccggtcatcgggtccattttaggcgggatgaatccgcatcatgcaattgtctcaggactcggcgcaatgccggagagcagcacgggcgttccgtggagcgcaggctatatcgtcgcaagcggaaaccttctggcagacttccgcgccaatctgaacgccgaatcacaaggaaggcttcaagtcgcacgcctgtatgaaatgaccgatgataaaggcgtgaaagatatgctcagctttttattggcccgcgataccatgcatcaaaaccaatggcttgcggccattaaagaattagaagaacaggaaggtccgatcgttccttccacattcccgaaggcgctggaaaaacagtcattctcccataagcttattcatttctcagatggcggagaaagcgctgaacaaaattggctgaaggaaacagcgccggacggagaaccatttgaatacgaaaaggaaccgaaagcgcacggcgaaatagctaagctggatcccgtcccgccgtatgtccacaacacgcttcccggacgcgagtaaagacacaagcccaaaacaaactgttttgggctttcattatgccttcagaaccgtccagtccggttcgtatcggatgtccgggtgatgtaacagctcgtgaatgacatgttcatcctcttcatacagcatcacttctattgaaagaatcgcagccttctgctcgttttcttcgtatattcggtcatgttcgttctccataaaatcatcataggcctgtctgttctcccaaacgctgataatctctgcgatgaacaggccgtctgcgtttttccgccacccgccggcctgtttgacgaagccatttacacatgataatgctccccaccttgactgtgcttgcgcaaatgcttcagcgtttgcagcgtctgtttcacatacaatctttttgatcagcatgacgttcctctgtgatgactgttttcgcacgcgtatgctcaacacacagattcacggttctgacgtaagagcgggtgcggtgaatcgtgcctttcgggatgagcaggctgtcatttgctttgagcactgcggtttctttgtccttaaaatcgatcagcagctcaccttccagaacgatgaaccattcatctgagtcagggtgatggtgccagtcatattctcccgtaaacactgcgaggcgcacacagtggtcattgatctccgcgattgaaaaattgtcgtgtttttctttgactttattggcgatagcgagcaaattcagcatgtcagacacgagtgaaaaacccctttttcattttattgtatctcaacggcggctcagatcaagattttcccaaaataaaaagcgatccagctgatgcgccggatcgcttttgatctgcaggttgtctgccttttatgcttttattagctgcttcgtctgtttccgcctttttggccgatttccttataaaaatctttgtcatgatttttacttgtggcttctccacctttttggccgatttcttgatagaattccttgtcatggttattgctagtggcttctccgcctttttcaccgatttcctgatagaattctttgtcgtgatttttgcttgttgcttctccgcctttttcaccgatctcctgatagaattctttgtcgtgatttttgcttgtggcttctccgcctttttgaccaatttcctgatagaattctttgtcatggttattgcttgtcgcttctccgccttttttacctgcttcttctctgctcattttgttattatcttgtgccatttttgaattcctcctttaattggtgttggttgttggtttcccgatttcagaactgctaaacaaagaaaacacattgaatgtgttttcgggcggttttttatcattctgtatccttcatgcgttttagaatccggcgttttttataaagcatgatgcctgtttccgcgatgctttctaaagctgaacggttggcggacgcgccgaagatgatacctgcggccggaaccatttgcagcagttttttcgcggcgaacgtatcgcgatagctgtaaacgacttcccgccagccttggatttgcgaggcgacgcgctgataggcgcggtcgttttgatcatattgccgtaaatcttgcaggatcgctttttttccgatgacgtcactggatacaagctggagcaatttgacgataaacacgcgttctttcttgtctttcggatcaaagccgtaagcaaccgcgatatcctgcagcgtctttaaggacaggccgagcatcgccggaatgtctgccgccagcgtgaatacgccgccgactcccgttgcggctccctgcaccgtcgcggcctttacgcttgtacgcgctacggcttctgcgatttcgtccatgacggcaagcggcgcaatgcggatgtcgtgaagcgtttgacatgtaccgtgcggcagccgtttttgaaacttattcatgatgcgcttttcagatgtcaggtactgtccgcctgactgaataaacgttcccgtttcatcgagaatgagtccgattttcctctgaataaattgcggtgtcagcttgtccaaaagctgaaacggcaagcgggtgaatgtttgccagaacatcaccctctgctgcgccttttcccatttttgaatgtctctcagttgtctttccaggtctgtccgctcttctgtcacccgtcctgcacgtcctttctgatttctttgttcatagtatacctttatggcgttttctttttacacccggccggattttttatccggaaaacattccattgtttaattttcttcaaattctgtatattgtataattttgaataatacgattgaaggagaatgttgaatgcaatggatttatttaagtttagcgatcatttttgaagtattgggtacggtcagcatgaaattatcaaatggatttacaaaacttgtcccaagtattttattattattgttttatatcggcagcctttgttttcttactttgactttgaaatatataagtgtctccatcgcgtatgcggtctggtcggggatggggatcgtgctgatttccatgatcggaatttttttctttcatgaacagttctctgtcataaaagccgcctctgttcttctgatcatcatcggtgtcgtttccttaaactttatttctgaaagtgaaacgtcatcaaacggcatcagcgttcatacggacagaaacagatgatgaaagggttaaaggttctcttcctcattacagatattggatttatcgtttattggattgttactttttttgagtggattccaaaaaacatggtgtttaaagattatgataacgccatgatcatggcctggaactggtcattctttcccttagatattttcatttcgataaccgggctgtacagcttgtttctttataaacggaaacatgcgttatggcgctctttcgcattaatatcacttgtgctgaccttttgttcaggcctgcaagcgatagccttttgggtatttatcggtgattttgatcttatgtggtgggcattcaatctgtacttgcttctttatcctttatattttattcagaaattgctggtctctcgtaaaactagctgtcattctttttgataaggcggttttctttttcttcaggcgggaaacacttttcataaaggagtgatagacatgccttggtctatgaaggattatccgcaatcattgaagaatctcgaggaacctgtgaagaaaaaagcgatcgaaatcgcgaatgcgatggtagatgagggttatgaagaaggacgggccattcccattgcgacaagtcaggcgaaagagtggaaaaaaaaacgcttctaaggaagaaatcgatcagctgatgaaacacgatgatgaaacgaaacgcggaaattgaatcggaataaaggaaaaaccccgctctcaagagaacgaggtttttctgattataaaccgtaataataagatagtgtggtgactgaaacgtagcctgtcgctcctgcatacgtgactttcagccatttattggaattggtgtagtggccttgaacatattctccggttacccaagaacctgtaatttttttaccgcttgagaatgttgtgatcgttgaacagctgaccttagagcatgagcgcatattagcaccgtaaataccgactgtgcccccgctggctaaaatggaaacgtccggttcagctttaggtttgaaagctgctgctgatgcagagccgccaaaagcgaataaagaaacagcaaaaatcatggctaaagaaatgatcgacaaacgacgtaccaagaaaattccccctcttttatcatatggccggaaagctttcctgacgttattatacttttttgcccgggagactgaaataagtctaatgctccaacttcttttcttcgcaagtgaccatgccgattcttttttttgatagataacagcggtttattggactggaatcactgatatatcgttgattcaaacgtttattcagagcggccggagtttttccggaggtcatttgaatggtacagaaaggttttatcttccaatggaaagaaacattattattctatttacccgggaaaacggaggaaatacagcgtctttttctcaggatcagttgcaccggacagaaagttgtgaagtgatatgggcaagtgtcctcttttcaccttttaaaaaaaacgctccacgcatccgcgcatgatcggacgcggaaacacgctttgcgaacggcatcgcttctttcccggaacgatgccgttttcattttcggacctttcttcggcgggatacatatcatagataaaacagggcatcaatgtacctgtttattgaacataaagaacttgacatctcataatagcggatttatgatgtagataaaataatttgcatctaggaaactttttgttatttagctaaaaatctatcggaatttaggtgagacataatgagcaaagacatctcagcacaatcactgcaatcaaaagccgtgcaggatgcacttgacggcaaaagcaagggattcaaacggcttctgccttttttaggccccgcctttatcgcggcgattgcctacattgatccgggaaacttcgctacgaatatctcagctggttcgaaatatgggtatatgctgctgtgggtcatcctcttttcaaacttgatggcttttttaattcaagttctttccgcgaagctcggcattgccacgggtaaaaaccttccggaaatcgccagagaccggtatccgaaatgggtatccgccgggctgtggatacagggtgaactggtgattatggcaactgatctggcagaatttatcggggcggcgctcgggctcaacctgctgttcggcataccgatggttgaagcggccattatcgcggcgatcggatcattcgcgattttagagctgcagcgcaggggttaccgggcgctggaagcgggcatcgccggacttctgtttgttgtggtgatcgccttcgctctgcaaaccttctttgccaaacctgacgccgcctccgttctcgaagggctgtttatcccgaaaattgacggaatggacagtgtgctcttggcaaccgggatactcggcgcaaccgtgatgccgcatgccatttacttacattccgcactgacacagcgccgtgtcgtcggaaaaacggatagtgagcggaaaaagatttttagattcgagacgattgacatacttatcgcgatggtgatcgccggggcgattaacgcaagcatgctcatcgtcgctgccgcgcttttcttcaagaacgggctgtatgtagaagatttagacgtggcttatcagcaattcggccactatatcggaccggcttcagccattctcttcgggatcgggctgctggccgcagggctttcaagctcttctgtcggcacattgtcaggcgatattatcatgcagggcttcatccgttaccgtatcccgctttatttgcggcgtttcattaccatcattccgccgatgatcatcattatctcgggggtcaacgccacagaagcgctcgtatggagccaggtcgttctttcattcggcatcgcctttgcgctcgtgccgctgattatgtttacaagcaacaaacgcctgatgggcgccctgacgaaccgaaaatgggtgacggctctcgcctggctgattgcggttttggtgatcgcgcttaatctgtttgtgatctacgattccttccgttagaaaaaaaccggccatagcggccggtttttcttttggcgccgggtgccgttcgtatctttttccgggcgtttttggtatgatagaagaaaaatcggagttttgcttatgtcagtatttatccttttttatctgtggattgtgccgattgtcatcggcatcttctgttctctttttgcttatcggacaacgggtaagaaacgtctgattcccggctttttgatgatcgcattaagcatcgtttccttaatcacggggctttggatcggcggggtgaactatcatgtgttcatcgggggcatgtttttattcggtacgttattggccggctccgccttcccgtttttcttcgctctttcacgcaaacgaaaataaacaggcatgccgcctgtttatttttattcattaaccctgaattataaaccgctccgataatgtgattccgcctcaatcagcctgtacatgtgttatataggcttcagcccatgtcccatcatcgaaactgcagccaaaatgaatcctgctaaagaagattttgaattataagaaaaatactgtatgaaaatcctatttaccccaaaaatacctattgatagaatggtatctgagaggggaaatgttcaaagcggatcatatcggtcccgcctaaatacatagactttcatttctctctacactacatttctaaaggaggatttcccattagacacgcagctaaaggcattctgtttgccgcatctttagcccttgtaactactacttttgtccccgcatccttagctaaagaaaatcataataatactgccaatgccactggaacgaccaaatcatttttttatcagactgatacgcaattttcctacggacttaaagcacaaagcgatgcatctgtgtcaaaaccagtcaaagatgtaatcagagaagtgctgaaaaataaaacaaaattattcaatcttgttgaaaaattagcaggaaagaaaataagaaatgaactcgaatccgttttcaatgaacacatcgaaccggttttaaagaaaatgctgaacgagtatgtcgccttaagctggactgacgtggaaaagaatctttatctttcacttaaaaagtccggactttctgacagccaggctaaaaacctcgctcaattgacaactttagcaatgaaagcattttaaaatcattcataaatgatcgtcaggaaaatacgtatgaagtaatgcaaagtgctgttagattcactctaatagcactttttcattggagatggcacatgactgtcttttttactgttctgctcactttcttatgctgccttgtgatttcatctcttatttttatgattctattaaaaaaagagatcgtggatacaccgccaaaccgcttagctcatgcagcattcatcttacttattggattctccctgttcttcgctataactgtacccagcctagttatgtattttgcagctataactgtaaatcattttttcggagaatatatcatctatggttcactttcagacttatacatattttctgtcgtcgtcagtattttagctttagtttatatgctaatccttacggcaattgtaaaaggaatgactcatgttttgacattgcctgcttggtcagcctatatccttgaattcatttttgcatgggctgctgtttacttctcaatccaatacgtttccaatcatatcattgagaacatatctatatttcaaggtggagaagtgcttctttcattgttcatcactttcttattttcgggattggatatccttttcactaatttggataagatcacaaaagagaaattaggctaagggggtaacaaatatgagaatcatgacatatatatcctatttttctatttctttagttttgcaggtggtatggctgctattaataaaaagaacctctaatatatctctgatagatatgactacggtgtccttcttattcaccctctttatgttcatcttagatcaaatgttcaaaaaaaagcggacaaattagcgactgttttttaataatcctcgggcttctctttcgttttgaaatgattccggatctggggatgttacggtgagccattcattaatgaataacaccagcctctttaaaatacttcttcttttatataacatcctgacttttccgtcatatattcaaacgaaaaaactgcaatagggagtaatgaaacatgatattgtttattggcaagttcatgttgctctttttactctgttcgctggcgtatttgtttaaaattgtttattacaatatagggaagaacattgcgcttaaaaccccgaaagggacaaagacaaaccggacggcacgtgtgtttgtcaaaaatggaactacactgaatgagggagattactttatgatcgctgttgtgaccgctctctggctgttcttgagatgaattgcactggtccttcataagttttttgatcagccatcgctcgccagccgtggcttttcacaatctccgttttcgtttaggacggctatatgcaagccaagtcgctcaacaaacaaaggagctgtcgagatcttctcgatagctcctttgtttttccttgaatgattgaagaaaggcttaaaaatggacggtttctttctcatgcatgcatcgttcaagaaaacacttcacagcaaaacggaaaggtgaacgcaatacactcagcggttaagaaccatatgaggctgcgtatgttgattactggataagaaaaagaaatcccccagtcttaaaaggtggaggtcaaaaattggagaacacttaaatatttatagctttttcagcgatgtggaaagttccagaatcactcatttcagcagtataaacatttgttacacttaataatccagtaaaaagaataccgattaaagcggagctgattataaccttcttcattatatagcctccgtaaccttaagtatttgtgtttgggcatgtatggttttctttaaaaagtttcttccctctgcatagtttctcttctcaaaatgaaagtcacctaattgttcagttagctctgcgaaatcagaccaaaggcgtttctcttctaagtagcctaagctttgtttcactgctgtttcattatattcttcgtataatgaattaatgatttttaatttcgccaaatattcttcttcattagaagtccgagcacgatttaaagccgtttgtatcaatatgttctttcacgtctattgcctttttgaaattctcttcagcagcaatcaaattttcccctcttaaataaactaagcctaagttatgaaagatcacccgataatccttttcactttttcctcttccaacccacgggcgatacttaatgcttcccgataatatgattctgcttccgtcagcctgtacatatcgtacatgttagcaccgaccatcatattacagccaatcactttcactttgtataattgatttttttcaaacaattgcttggcttttttcaaatgattgagggaaacaaagtgctgatcaatttgataataggcatcagctattttgtaatgaaattcagcttgctccatttcatctgatacagcattcaactctctctctgctttgcgataatagcttatcgcatcaacatactctttatgatcaaattcatacattccacgaaaaaataatgagtaatacttcaagaggcctgtaagtcttttttgcggcttttctattttttcaagcagttcgtcgactgtggggcgatctcgatatctgtcttccggctccaaggaatctaacatcaattggtgacgaaagcacatcaatgaataaaaaacaagcaaatcctgatcctcttccatctcctctatttcctgttcgacctcagcctttaaaatctcagcatcaggcacactgaactggcgaatcattttgtaccattcattgatcttgacaccaacttgggacgacggcaaaacttgatccatatatacctctccctctaatcactatttttgtaatattataactatttgaacataaagtgaaaacgaaaaaaaaccgcaatttacttttgcgtcatactcacctgattaacttgtttttaagacacagggaaattatacctcaacataaaaatactgtataaaaatactatttacccaaaaaatacctattgatagaatggtttctgaaggaggtggaaaaatattcaaagcgaataatataggactatcctaaatacatagtctttcatttcgctggcagattacattcctaaaggaggatttttcattaaacacgtagctaacggtattctattcgccacatctttagcccttgtaactgcttcttttgtccccacatcctgagctgaagaaaaccgagatatcactactaatgccactggaattaccaaaccaattttttataataattgataagccgttttccttttagcttaaactggttttaaagaagctattaaacgaatatgttgccttgagttgtattgacgtggagagaatctttatctttcacttaaaaagtctggactttctgacaaggctaaaagcctcgctcattggacaacgttagcgatgaaacattttattgttattcataaattattaggaggaaaatatatatgaagaagaaagtaatccctgtagttttaagcgcaactctacttacatcattcttgggtacttcaggtgctttagcagctgaaaacagaaccacaactcctgtaccggtaacgaaaactgcaccaggtactattccaactggaatgcctggcactattccaaccaaagcggctctcaatggtgactaccaaacccaaggtgtagtttcgtggtcctataaggctttcagagctgcctgccgttcaggtggatggcttttatcaaaagccttaaagccattctcccctaaagctgcggcatggattagaaaaaactctaagaaggttgccgacattatggataaaggtgaaaattggggtgtaaaacaatttacaaaagcttttaaagctatcggagctcctacagatgtagctaccactttagctaaattcattgttgctttgatttaacatatttaaaatttaaagtgctgttagattcactctaatagcactttttcattggaggttaacatggctatctttattaccgtattgctcaccatactatgctgtcttgttatttcatctcttatttttatgattctattaaaaaaggagattgtggatacaccacccaaccacttagctcatgtagcattcatagggcttattggattctccctgttcttcgctataactgtacctagcctagttatttattttgtagctataactgtaaatcattttttcggagagtatatcatctatggttcactttcagacttatacatattttctgttgtcgtaagtattttagctttaatttatatgctaatccttatggcaattgtaaaaggaattactcatatttttaaattacctgcttggttagcctatatacttgaattcatttttgcatgggctgctgtttacttctcaattaaatatgtttccagtaatttcattgaaaacatatctatatttcaaggtggagaaattcttctttcattcttcataactttcttattttcgggcctggatatactttttactaatttggataagatctcaaaagagaaattaggctaataaaaagaaaagcaggcaatttagagcctgcttttttattccctttttaacatttctccaagccttgctttcgttttcggcccgtaaatgccgtcagcaggcagtccatacatggactggaatcgtttgaccgcgtttgctgttttcgaaccgtaatagccatctattccgttgttctttgcccctttgtccggataataatagagagctgccaaagctgtctggatctgtttcacggccgttcccttagttaaggggcttgtcactttaaaaacgcccgatggcagcgtgtaagatgatttttttccttttgttggagagctggccgagtccgtcagctttaatacttggccgactttgataaaattcgggtccttgatactgttcaatctctggatggtggccatgtttacggcagttttctgtgcaattacagggaggacatctcccttcttgacggtgtacgtcgccacgccagtctttgttcctgtttttgctgataagggctgtgcgatgctaatgtgcgaaccacgtttgttatgaactgtcctggccctccaaaagcttttttatcagccatcgcttgctagctgcagattttacgattttctttaccgtttccgcagattttaatacgatatactttcggttacggttcccgtcctctaagcttccaagcgggttcaaactgctgaccacttccttaccatggaaggggtcagtaaagaaataatcatcaataagaaagcctaaaaaaataaacaggcatgctgcctgtttatttttttataaccgccggcttcttaaaacagccgttttaagcttttcttgagtgacggcatttcgattttttggttttcaaagaagtttttcagcatgtatttgctgaagcccttcgcttggccgtaagtgatttttcccggaagcggcggctcgtcgccgatgacggcgtcgatgacgaccggctcatttgagttgagcgcttcatgaaaagcgggagccaattcctcgtgtttcgtcactttgatgccttttgctccgcagctttctgcaaaagcggcgtaatccatattttgcagctgggtgacgtagtcaatgttgcctttgacccgctgttcatattcaatcatgcctaaattttcgttgtttaatatgacaaccgtaatcggcagtttatatttaacagccgtcggcaggtcctgcatcaccattgaaaatccgccgtctccgcaaatggcgatggactgccgttcaggttcggcaaggcttgcggcaatcgctcccggaagcccgcatcccatcgtggcgagccagcttgagacgataaagtcctgcttcttcatcttaaaatggcgggccatccacaccgtaaccgttccgacatccaccgacaggacggcgtcctctgcggcggcatcctgaagccgggcaatgacctgctgcggcttgagcggatgagtcgcttcggtttcatccttttcgatttccttccaccaatgcttcatgtgctcggtgcaggcgtccaaaaatcttctgtcttctttatattcaatgtattccgtcagctctttcagtcccagagccgcatcactgacgattcccgcattgacgggatagcgcttcccgattttcgccggatccgaatcaagctgaatagcaggcgtatcatccgggagataatccctgtatgggaacgacgtaccgagcatgatcagcagatcgcattcctccattgcttcgtaggcgggctttgtgccgatttgcccgagattcccgagaaagtggggatggctgtcaggcacgacgccttttgccggaagggtaatgacaatcggagcggccgctttatcggcgaatgcgagcagctcctcttttgccgattttaacccttggccggcgagaatgaccggtttttttgcgttgttaatatattgcgcgcatgtcacgagatgttcttttttcggctctatatcggctttgaggtatatcggcgatgtgtaaaccggctcccgtttgattttttgcgcgaataaatcatcagaaacggttaaaacggcaacgccttttttgctgtaagccgtgcggatcgcctgattcagaagatcgggcagcgcttctgccgtatgtacttgctggttgaacaccgccacgtcctcaaacatttgctctaatttgatttcctgaaagctgtcacggccgatttcatctgaggcaacctgtcccgcaatcgccagcaccggaacaccgtccgctttggcgtcgtataaaccgttcagcagatgaacggcccccggtcctgcgattgaaaggcagacaccgatctgcccggtcagttttgcctcagccgcggcggccagggctgcgacttcttcgtgccgggtttggatgaatgtcaggttattccgttcatgtctcagttcttcgataaattcattaatgctgtctccgggaatgccgtatatatgaccgactccccattgttcaagcagctccgtcattacgtgtcctgctgttttacttggcatactgcatcctccttttacctgtattcatcccctttttcatacgggttgaaacacgggctatactctcagcttttttctcagcagatcaaggatggataacagatttcggtctttaaggactgccttacgatttgccgccccattgagtccgtcttttatttggagtttcctgttcggcaccatgaacagcggcagccggtttggggaaaaccagcgtaatgcggcggtttccggcccgttcatcagcggtgttcctccggtaatggctccgatgaagacatgttgtgtatcttcaaatgccggcctttcatactcaccggctttttttatgatggtcacgttataaccggtttcttcgaaggaaggcctctcttacggctgcggattcaggtgtttcaccttctgcgatcctgcccccgggcaaatcccataagggaatgtctttccgttttacgagcaatatgccccgcccgtcattttgaatgataacaaaagcgccttgagccatggcgtcctcctttacaaaaaagaccgcggcatttcagcctgcggtctttgccgttactttttaaaatgatacggcagggtggcgacgattatgtccttcttccaaaacagccggactcggagcaagaaggctgattggttgtgaaggatggtctgccagcgttttttcgtaatgaattgcggaaacagcaccatcacggagaactgttcttttttcgctttttgttcgaccgtttccaaaaatttatcaaacgggtgaaccagactgcggtatgaggaatgcagggtgacgaggcggacgccgttatgaagctcttcccagcgcttttccacctttttttcgttttctctgtcaaaggaaacatgaaccgcaatgacctgatccgataatgatttcgcatactgaatcgatttttggacgacggtggtgacaccggcgacaggcacgatgacgacggttcccctgatttcctcaggctgctgatcaacgacccgcagctgttcgccgaccgcggtgtagtgatttttaatgacgaaaaacagcatgacgacagcaggcatgaataacagcaccggccagacaagattgaacttcgtcgcgaataaaatacacagcaccataaatgaaatggcggcgccgcatgagttaatcagcatttttaccgcccagcccttcggcttctgcctgatccacttgatgcacattcccgtctgcgacagcgtaaacggaatgaacacgccgacggcataaagcggaattaaatgttccgtgcggccgccgaataaaagaatgagcaggatggacgcgataccgagaaagatgatgccgtttgaaaagcctaaccggtcgcctcgtaccgtaaacattctcggcatatactgatcgcgcgctaaattaaacgccagctgcggaaatgcggaaaagcccgtattcgccgcaagcacgagaatcaatgatgtaacgccttgaatgaaataatacaccgtatggcggccgaatgtttccgcggcgatttgtgaaataacggtctcgttaggcttcggacccgtgccgtagccgtacgccagcaccgtaatccccgtaaataagatcgccagcagaatccccatcatggccaaagtgcgggccgcgttttttgccggaggatttttaaaggccgggatcgcgtttgaaatggcttcaacaccggtcagcgccgaacaccctgaagaaaaggccttcagcagcaaaaacagcgtgatgcccgccacgggcgtgccgattggtgtatgctcggccggatgaacctggcccgtcatgagcttaaacagcccgacgacgatcaaaaggacaagcgccgccacaaacagatagacgggatacgccaaaatggacgccgattctgacagccctctcaaatttaaaatcataatcagaatcacaagcaaaacagcaatgagcaaatgatacgggtgcagggccggaaatgccgatgtaatcgcgtcagttccggcagaaatgcttaccgccaccgtcagaatataatcaacaagcaatgagccgcccgcaatcaggccgggcttctcaccaagattctctttagaaaccatataagcgcctccgccttgcggataagcgtaaataatctgtctgtaggacagaatcaaagcaagcagcaaaatgagaacaccggctgcgatcggaatggaataccaaaacgcggccgcgcttaccgcagccaaaatgatcagaatctgttccgttccgtaagcaactgatgacagcgcgtctgaagaaagcatggcgagcgccttgagtttcgtgagtttctgctctccggccgcctgtgatttcagcggtttcccaatcaaaaatcttttgattgaatggtacatttgttgttttcccctttttttcattttccgtttgatttacaaacccttactgctatgatgtctccgaatgctgattgcatgccatatttcagcacagcaaaaagacacagaggcaaacggatgcccctgcgccataatcgtgcacaggtttcattcatctcctctcatgaacgcttacgaggttagctgtcggattcgggctgatgagagttggccctacctgaaaaaggattcaccccaagcggcatcacgcgccgcaaattggttcccccgctctgattacagattaagcgatatagattataaaagagatcatactcccgtcccgttcagttgtaaaggggcttttatgctgtttcaaaaataaaaaaatcaccgccaaaaatggaaatcaaaatacaaaaaaaagaggcctgtgaacggcctctttttccatcattactcttcgcttttttcatgatccgctttcctttttttccttcttgccgtcagccagatcagaccggccgcaatgatcataagcgccgcgaaaacagcaatatacgtaacgttcagtggtgcggaccggctcttcgtatcagccgccggactgctgtcatcggacttgatttgctgatgattcgaaaacagctgccggccggctgtttcgttaatgacggttgcggcatcgcttgtgctgtctaaaaagctgatcagctcttttgtgacagacgcgccgcttcctgataacggagcaaaaacagcgatgctccggccggagtcccaaggtgattcctgggtaaacgcgacttgtttcgtcgtctcattcagcatctgaaacgaagaaacatcgtacgcgccgctgcggtctgacggcacgagaagcttagaggcgtttgatttcaaaagcggaatttgcggcaggcctccgataaacacaacattccggcctttggcatccgcttccttcatgtctgatgccgtctttacggtaaagccgtttccgaatgaatccgccaccagagaaagttctttcaatgtctgtatgtttacgccatccgggatgacgatcactgttttctctttcccgccgcccgcaaacgggagcggccattgcccgaaatccgctttctgcgccgcatcgcttaccggatacgtcagcgtgctgcttttatcaatatagacccatttgttttcgtcacggtcgatacacggattgttatgtttcaaacctgatgtgacaaattgcagatcaatgtacctgctgcttcgcaaaagcttcggatcaatcgggatggagacgtggtaaaagccgtctttatctttattgccgagatcatcaagacgcaccgcattcggctgtccgttgaccatgacgttcagctccgctctctcagcgtcatcatctgaatccgccttcgtccggatcgattccgacgtttttaatgtaagtgaaagcttgaccttaccgtctttatcaacagcggcagccgcagggtaaaagaagtgctctgacgccgttttgtttgatccgatcgttacatttcccgcgccgaagtcctctagtgtcagtttattgcctgtcttttccgcagcaggctgaaggcggccgattgtcaaagtatctccgcccagctgacttgaataagcgctgtctgtgatgacgcggattttatccgccagcgttttgtctgattgcgccgtgacaaacaggacgggctgccgtttgtcccctgatgtcagaacccgttcagcgagaagaagtttgttgtcttccgctttgatgttcccgcgttcgaaaagctcttttattttcccgttccaatgctgatcagcgccgatgacaattgacggattgctgattttgccggcgtcggattcttttacataggataccttcagcctgctgtctgccgttttcagaaatgcttctgctttgactgcggcttcagcttccgccgaggtcggtttgtcaggaaggataatatcggtttcttcacccgtattgcctgattgggcaaacggatacgggaaatggccgagatccgctccctttgacttgcttgcttctgaaagcacaaggcggctgtccggataaatttttatccagttgcctgacgtatcctgcctgacgcagacgccctcttttaatacgccgtaaaatcgtaatgatacattgtgaaagccttgggcggattggcttttgctgagattgagcttcaccgttttccgcttggaactgccgtcaagcttaatggatttgacgggttcatcatcaatggcgatggttaaagaagacggggcaattaataggtttgacgcctcgtaatcaatcagaagcgactgatcggcattcgaagctcccgcaggaatctgataggtcagctctgcactgtctttcgccccgtacagtgtcatcagatcgccagtcagcgcctgctgctcttttgcgccggcgcttgttccgagggcggaaccgtccgttttcagttcccgggccgcggccgcctgcccgttatacatcaatagcaaaaggccagttatcaatatgatcgcttttttcaaaaaggtcacccgcttttattttgattgtatcgctccgttttgtaccacttgacttcctgcttgaacaagcggtgcttgatctctgtgaataatgaccagatgacgagcacgatccaagcctgggagtatgtaaagtacatcagaaatacgataaagaagttttgtttgttcatttctgttttttcaatgcttaaagtaatcatgacctcagtcataaacaggaaaaaggccagtatccacaaaatcatcgccaaaaacccgacagccagatgcaggtcgtaaaaaagattgatgataaaaatcgtgtttgacatgatcacaccgaagaaaaacaaaaaatacgtaaaaaagaaataaaacagatcgaagatgatccgcttgcgtttcagcttgaaaaattgggataaaaacttgagaacaacgtattggttgccgcgcgcccatcttgtccgctgacgccaccacaccttccatgtctcaggctcctgctcccatgtcacagccgccgggaaaaagcggatatgatagccgagattatacacgcggatggtcagctcggtatcctccgccagcgccttatcatcccagccgccgagccgttcgataatgctccgcctgatcgcgaagttcgtccccgggatggtggcgattttgaaccatttccatctgccgccctgcgccatccactgaaagcagatggtttcaatattgataaacttcgtcaggatcgttttggccgcgttgatgacacggaatttcccgacaaccgctcctgctttctcatcattcatcagaccgagaaccaggtagtacaccgccattttttccggcgtgttgtccgcatcatacacgcagatcacgtctccgttcgattccgcgaaccctgagttcagcgccgaagattttccttttccggcgttcgggggctttgtgataaccattttaatgaagtcatactgacgggaaaattcattgacgatgtctcccgtccggtcggaggaattatcattaacgacgatgatctcaagcctgtctttcggataatacaggttcaccatcgccttcagcgtctgcctgatgacgacctcctcattatgcgcgggaatgagcacgctgaccttcgggagctcccccatctttgcgcgccatttcggaatgttccgttcgtaggtcatataatgcctgaatccgccctgcatcagaaacatgtgatagagaagcatcgcccatattaaacttaatgagataaaaaacagaatgttactcaaggctccttctctccttaaagattcgtttttttaatgtggcgcgcaaataaagaacgtagcaggcgaacatgatgataaacaataacaccacgccggagagaatccaaagcgctttttccagaggcgtctgctgatggtgattgaaaaaggccgttatcggatgaatcttgttttccacatgaatggttccgtctccgtccgttttgatcctgacgctgtccgacgttaccgtttgcttcgttttcttcagatcgagccactcgccgccgggaatccgctccatctgattgacgagctcggggaggtatttcatgccgagatacggatggtagaaaccgcccgccgttccgccgccgaaatcaatcatctgcgaaatatgattctccatatctccgagcggattttcctttgagttatcggcataaccgattgtttccgggtacagcgtcatcccgtccagcatagccggctttgagacgaacggaggggcgcccgaggttttccacgtcgtgccgctgagctgcacttgtccgaaaatgctggagaaataagaagatgcgattttgtagccttcttcagacatcgtatagtgcggcgcttcgaatgacagcgggtaaaggccgagctctgtcagatcgtcaatcgcctgctccagcttcgttctcgtgtagatgttttctttttcacggaaaggcttcacatacgcccggtacgctttttcattcggaaaatcctgttccttttcaagcttgaccggagtatcatccgcattttctgacgtaatcggctgatccgctttggcatcccaaaattcaaagccttctcccgtttcgctgtatcggtatgcgtgcgtgtagccgtgaataatgatgctgccgcccatttgctgaagttttttcaggacgctgaccattttcggcttgtccgccaggtatactttttctccgttttccggattgagatagaccggaatgaccgccagaataaacggaatgtgtcttttatgcaggtaagagcccgcttcgtaaagcaatgtttcatctgacatcggactgatgtcttcaagccgcaagtaaaggagggtgccgccctctgattctccgaaagcgctgcgcagcgctttcgccgtcagaaacgaatcatttaacaggctcgtcacaccgaaataatagtcagagcgcgccgttttccacataaaagggcgggtgccgccgtcaccggaccggtatgtataaaggggctttccttttactcccgatacgccgagcacggacattcctttttcaagcggcatgtctgttttttctttcttgctgtaaatgcggtataccgtttctttttctgtcagggacaaacccgcaaattggcggaactgtccggcgttatagccgatgctgataagctgctgcggcatgctgctgatcagagacacgaatgatgcgctgagcttttttttcgtgacgccgtaatagatgacgcgccgattctttttgaggtccgcggctgtgatgtctccgtcgcttttcacggtgacggcggatgagaaatggcccgcggtcagatcaagcattttgacctcagcggtttctttgccgtccgtgcttgtataaataatgagaatgccgtcctttttgtcttttgcttccgccggacggggaacataaaccgccgaaatcatgaagagcgccgagagtaagagacgtatccatttagagttcattcatcatcatctcgttttccagttcatttaaaaattgctcggccgtttgtaaatcctttcggtacgccaagtaacatacacggaaggtgatggagacgtatttaccgttttgcagccggtacgtatccaattcctttttcagcttcgccagaacggccggcatgtgttcttcaggcgtatgggtcagcacgatgccgaaccgttcggcggacggcctgaattttttgtctgtttcccgaacgcttgaccggatttggcggctgataaacgccagcaggcggtcggtctctttttctccgtagagggatttgaattccttgaaataatgcatgtgcagcagcaaaaagacgaaggaattgccgtaacgttccgcccgcttgatttcctcagaaagctccagcttcatccgcagatggttgtcaaagccggtcaccctgtcgacggcgacaaagctcgtaatctcttcacgcagctgtttcactgagcgctcaagccccttcgccaactcgtgaatccttcccgctatgtaagaaaagacgagcagcgcaatcccccaaatgaccagcacctgcagactttcggcaccggcagacgccataaagctcccggtctgaaaccacaggagcagactgccgagaacaaataagacgagtaaggtgatgacgagcgcgtagattgccccgaaccatatgccggctcccgcaacaagcaatgtgatgcaggttatcagaagccctgcggattgctgagacgcatagtaaataaaaaaagacagcagcaccagcataactgctgtgtagctgcacagtttttgtgattcattgaatgatattttcattaaacaatttcctttcagccagaagcggcagcaggttatcgaaagaatgtgtatcgcccccgctcatatagccgccgtaatcaggtttcagcgtgtccagtgtttcaaatgaagtcattctttcataaagcggcttgatgacagccggatcagctttttgttctgctaaaaaaagaacggccagggcgtaaacggacggtgattcgtattgaaccgccggctccttcgtgtctgcgctgtatcgtccgtacagctgtccgcgcgtcttaaattcctttatcatccatttcgacagcacagcggctttgccatctccccgcttcagattcacggcggcatacagctggtcgatgacattcacttcgctgtcatatttgtattcctttgtttcggtattgaacgatttcggcagaaaaccatttttcaagggcgcaagattgagaacatcgaggttccggttttccgtcttctcatcgataatccccttttctctgagcatctgtaaggcgccgggatcgacataggacaacgtcacggtctttgacgcggcatttgaagcggcatcataataatccgtaaaatacccgtcattcgtattgtatttttccagcgctttcccgatctgcaccgctgttttcccgtattcactgtttccccatagggtttcggcctcattcagacagttcatgattctgaaatcatcaattaaggcattggtgccgctcgctttattcccgtcaatcttccacgacacgagcccgtttttcgtcagaaacgaatcggtgagaagctgatattgcgcttgaaactgccgttcatctttcctgttcagcaaaaatgccatccatagtccgagagactctgataaatattccggctcaccggatatgttcgtccggatcatcccccgcccgttcatcaatttatgataaataaaatgctctgcgggctgaagcggcccggacggttcggccgcagcctgtttttcagtgccggcctccgcgcaccccgccgtcagaacgattgaaatcaaaaggatcatcagacgaaaaacgaattgcttcacagtctatcctcctattttataaacccttttttagacccatatcttattttttcacaaagtatttttactatataggaaacgataaaagaatactagcattttttcacattgggaaattttaaatgggagcgccgtctgctcaccttttcccttttcgtctggatcgtattcccattacagtaaaaaacacaacaaaaggcagcatttctttacaaatgctgcctttctctgatctatttatccaggccgagttttttcagctgttctgccagcgcgttgttcatcggctcctctttgttttggcttttcatataagagttgatgtcccgcttggatgcgcgtccggatttatctttcgccttgcgcttttcaaagacggacagtttctcccggtggccgcatacacatgcgaaggtttggccttcgccctggccgcgaagctccattttcttatgacagttcggacagcgggcatttgtttttcttgccagcgttttccggctgccgcactcacgatcctgacatacgagcatcgtgccgcgtttgccgttgactttaagcatcattttgccgcaatcagggcaggcggtgcctgaaatgttgtcatgtctgaaggtttggctgctgtttttgatttccttcaccgttttgcccgcatatgttttcatgtctttaatgaacacggcggatttcagtttgcccgctgcgatggcggagagcttttgctcccactcagcggttaaggccggtgattttaaatcttccggcacgagctgtaagagctgcttcccttttgacgtaataaaaatatctttttcttttttctcgatcaagaaactgttgaacagtttttcaatgatatcagcgcgggtggcgactgttccgagtccgccggtttcacccaatgttttcacaaggttcttctcttctccctgcataaaggcgcttgggttctccatcgcagataacagcgtgccttcattaaagcgcgccggcggtttcgtctgtccgctcgtttctttcagtgatgagacagtgaggcgctgaccctgctgaagatccgggagcgtctggtctttgtcttcctcatgatcgtcgtcatcctcgtacatatcatacacggctttccagccagacgattgaaccgttttcccttttgcggtaaatgtttcgccgccgatatcggctgtgacctttgtttcttcgtattcgaacgccggcattaacacggcgagaaaacgtttggcaatcaggtcgtaaagctttcgttctttgtcgctgaggcttgaaaggatcagcggctcctctgtcggaatgatggcatggtgatccgatactttcgcatcattgacgaatcctttatgcgctttgacgccccgcttcagtatttgattgacgtactgtgcgtacggcttaacttccatgccgtttaaacggtcttttaaagtcggcacgatgtctgcggaaaggaatctggaatccgtccgcgggtaagtgacaagcttatgctgttcatacagcttttgaagcacggacagcgtctcttttgcggagaaaccgaagcgcttatgagcgtcccgctgcaattccgtcaagtcgtaaagaccgggagcgaagcttttcttcgccgtttttttcaattctgaaatgactgccggctttccttggagatcttttaccaaacggccggtcaccgtctgatcgaatgttcttgtctgctttgtttttttatcctgccatgtcagcgtcatctgatcagccgccgcgcggagaccgtaataaggaacgggtttgaacgcctgaatgtccgcttcacgcttggcgatcatcgccagtgtcggagtctggacgcgtccgcatgacagctgtgcgttaaatttcgtcgtcagggcgcgggtcgcgttgatgccgacgatccaatccgcttccgctctggcaacggcggaatgatacaggttttcgtactctttgccgctgcggagcttttgaaatccttctttaatcgccttatccgtcacagaggaaatccacagccgcttaatcggtttgcggacgtttgccttttcgataatccagcgggccacaagctccccttcccgtcctgcgtctgtagcgattacgatctgggtgacgtctttccggacaagctgagctttgaccgcattgaactgttttcctgtttttttaatgacgacgagctttaaaggctccggaataatcggcagatcctcaagccgccatgattgaaattctttgccgtatccttcagggtcagcgagcgttaccagatgcccgagcgcccatgtgacgatgtagcggtcgccttcaagatatccgtttccttttttatgacacttcagaacgcgggccaagtcccggccgactgaaggtttttcagctaatacaactgtttttgacatgcttttcacttctctttctttcacaatcatcctgttattataacagacttcctcacgctccctctaatcgaggacgttttttgtgtcaatttctgagaaaatgacgtgggtcacggtttgggcatacggagaggtgcggttgatgaagtgttcgatcgtttccaggctgtccgcgttcatcttcagcatataacacgccgccccggcgacccgaaaacaaaattcaatgttgggaatggattgaatgtaggttttgaattgatcgtatttcccgtttttcaccgtcgcttcgacaatgcaggagacgggaagcccgatctttttttgatcaatgtccaatgtatagcgcttaatgacgccgaaggattcaagctgtctgacacgctctgtgacggacggggctgacaatttgatttttctgcccagttcccgcatggacaggcggctgtcccgctgcagctctttaatgatgctcagatccacattatctagtttcatgactgtagtccttccttacccttttggctatattatcaagagaaatccgaaaaatgacaagaacaacaggctgaattaataaaggttttttaggaactgacgcgaaatggtcatattaggactgccctttgcttatagtatagaggaaaaaagatgtccgacaggagggagctgtatgttacacacgcctatcggcagacttcgcacgatggggtttattgaaggaatgtcgcttttggtgctgctgtttatcgcgatgccgctgaagtattgggctcatcatccgctcgccgtcaccattgccggttccattcacggcggtttgtttatcatttatctggcggtgctggcgtatgcggcgtttactgtcaaatggcatgtgaaatggtcagccgccggttttatcgcggcctttattccgttcggtaattttatttatgatcgcggcctgagacattatcaataaaaaagctcctcttctgcagaggagcttttttcatgcgttacatccatttcgtcacccaggcgatataataagcgccggggatgaatacgagctgggcgagaagcgtgcccgccacccttgatgtcaccatcgtcaacgatgtccattttaaggagacgtagctgcgcttgcccttcgccacatcgtctgccagtacggatactttcgggtcaacaaacacagccaacagcatagtcgcaactccgttgattaagcctgatgccatcacggcggtcgtgctgtgctcaggcgccagaaggccggcgtacagagcggacagaacaccgatcgtgtaaatagacgtaatgaccatattaatgacaaacaagcgtttcggaatcattcggaattgaagcccctttaaataggagactgacggcagtctgatataagaacgcgcatgcttcagcccgttcagtgaaaatcctttcttaaatacctgcatgacggagcctcctccgtccgccaagtgtataatcgccctggagaataacgcgacgaatgtcggcaaaagacagatgccgagcatcgttccgaccgtggagccgaatattaaaaatcgaaactgagcatccacaacagacagggcgtttgatccggcggcatcaatcagatgtccggtaaacggctgctgaaccatgtttgacatgcgcgacacgatgaccatgacattaaataatgacagcgcggacgcgataaatccgactctcgcgccggaaagccgtgttgcataggcaagcgtttcaatcgaatgtatcagcagcagaaaacagaagataaacagtacttgtgaagtaataacgtgcaatgtatgattcctccaaatcttttctactgattagactctgcagactgcggcgaggtttcggccggttacataaaaaaaccgcccggatgtccggagcggttttgtcttattcttttcttacgcaaataaataatatatggttgcccgccttagcccgcgggtgattcgtgtattaacagttccgacagaatcattcttcgaaagtaaacaccatggaagttcttgaacacaagacaacgaaagccctacctctcaatcgtcactgcggctccgaagccgcgccggtgtgaattgtaaaacaaaaagtcttttttccatctcttcgttaggggcgaatatcagaaggaaaagaataagctcagctttttttcaagctgtccgttgaagcctgaagcttctatatcaaaacagaaaaaagaagtttactttcttttttatttgcatgttgtcacttagcagttaagtataacagattgcccctgaataatcaaatgatttattaaagttccagctcggccggcgttttttcacccgcgttcatgagcttgatctgcttcggttcaatttcaagaatcaccaggttcggatcgtcttttccgtcaaaccagcgttccagtttcggatcccacagcttttcttttaaatcggctgagttgttcagtttggcggttccggccacttccacataagcgtcaccgaatccttcacagtcataccctaacagaatatgaacattcggattgttttcaatttcttccgctttatgagtgtctttgctcgtcggcgtgtaaatcgttaagccgtcatggaaaaatgtcatgtagcgtgaatgcggtttgccttgctctaccgtcgcaagcgaaccgactttatgatgatccagtacttcaagcactttttctttgatttcattttgattcatgaagaatcactcctttttaacgtctccgcttttacttttccacattggggagacatttaaaccaagaaatgtgctcttctgccgatcttcgctccattcccgcttcagcatgctgtagttcaccgtgtcatgataggcgccctgtacgaaaatgccttctctcgtcagtccttctttctgaaatccgagccgttccgccaccgccctgcttttcgtgtttttttcagccgcgctgatcataatacggttcaggccgagatcctgaaatgcatgggtgatgaccgcccggcagcttgcggtgataatgccgaacccttcatgctctcgatccagccagtagccgatctctgctttttgattggctgtatcgacattatggatgctgatcatgccgcaaaaccggcccttcacaaaaattccggcgtcaaacccattttcttccgcgtatttatagcgccattcggggatgatcacatcgcggtacgtatcgatatcagccagttcttccgcccagctgagccattcgctgagatggttttgatttcgcttcataacagaatacaattcgtccgtatcttctttggcaagcaatctgatcgtcagatgttcccggatttgacaggaaaacacgatcacaccttctttcctttattagccattatacaggtaaattcatttttttccatacaaaaaaagatgaggcgtgcagcctcatccttaaatgcgcgggtcggtgaaaacatcgtgatcatccgtgcttgtcgatgacatttccgtgacgaccgccccttcttctcccgcttgaaaccaatgcttcgtatccggcggtatggtgtattgtccgcccggctcaagcacaatctcatgccagacggtgtagtattccttgtcttcttccggcgggaggacgcttgggttctctgtcttttcgccttccacgtagagatacaccttcccccagcggcagcggaatgtctcttgttttcccttctcgccgccgaccggcggatggcggtgttccggacacgtctggcgcggaaagagcaccaattctttcgaacagtagcggtcggtattcacgtaaataaacagctgaagcccggtttccttaagcttacctaaaccgtaatccataatttgaatgtcttcgacttcatcatcagtcagaacgattcccgcattttgatagtatgcattcacgtcatgtttcgatatcgtcatgcttcagcccccttatgtgtttacaaatccgccgccgttgacatgcagcgtctgcccggtcatataagatgattcatctgaggccaagagcacatagcagccgacatgttcaacaggctggcctgcccggcccatcggtgtagtctgaccgaaggaagcgactgtttcttctgagaatgtcgccggaataagcggtgtccagatcggccccggcgccacggcgttgacacggataccgtcgttgacgagcgcttgcgccatggatctcgtaaaaccgttaatcgcgcctttcgtagccgtgtagtcaatcagctgcggattgcctgtgtaaggattaatggatgtcgtattgatgatcgcgctgcccggcttcatgtaatcaatcgcttttttagtcaaataaaattgtgagtaaaagtttgttttaaaggttctgtgaagctgatcgcttgtgatgtctttaatgctttctttcggatgctgttccgcggcgttattcacgagaatatcaagacgcccgaattcttcaaccgttttttcaaccgcttcattgcaaaagtcttcctcaccgacatcgccggggattaacagacattttacgccttcttcttccactcgtttttttgtatcttccgcatcaccgtgttcatcaaaatagacgatcgcgacatttgcgccttccttcgcgtaagcaaccgctacggcgcgtcctataccgctgtcgccccctgtgataagtgcggttttcccttttaatttatcagcgcctttatattctttgtattcataaacaggcgccggattcatttcgctttcaatgcccggctggcggttttgtgattccgccgggaattccttcggatagttttccatgttaagttcctccttcttgttcgatctcatatttcttgtctacctcgtcagtcttccggataaacatgattgagacagttcagaatgttttcggagaaaaatgtttcacatggaacgcaagaaaaaaacccggctggcagccgggtttttgttttcaattatgaacggaccgcttgtttgcggagcacgtcttttctcacttttccaaggttgtttttcggaagttcgctgacgaactcaatttccggaattttaaaggcggcaagacgttcttgaaggaatcgggtcacttcttcttctgtcaggccttctctgccgtttgtcacgatgaacgctttcggcttttcaccgtaaagcggatcagggataccgacaaccgccgtttcaagaatgcccggcacttgctgaatgacctcttcaatctggtcgggataaatattgtcgccgccgtagatgatgacatctttgtaacgtccggtgataaagataaatccgccttcatccacatagccggaatcgccggtatggaaccagccgtctttcagcacttttcgtgtcgcttcttcgttaccttcgtagcctttgaataaaaacggacttttcacaacgacttctccgattgagccttgcggaaggaattcacctgtttccggatctacaacgcggacgtccacttcttccatcggtttacccgcggaagcggctttatccattcccatttgcggattccaagagctgataccccacgcttccgtgcttccgtatccgtgcatgagcggaatgccgatatcgagatactgctggatcaggctgcttggcacctttgtgcctcccgtcatcatataaacgatagaagacatgtcagtctgatgcgtttcccatgctttcagcaggtatgtgaaatagactggcagcgccatgatggtttgaattttttctttttcgatgagcttcaggttttccacagggtcctgattgtctgtcataatgaatgtcgttccgctcatcgtgccgaccatctggcagataatcgcgctcgtatggtaattcggatggcatgctaagaagcggacatgctgcattctccccgtgtatgccaatgtcgcgttgacgtagttgtatataccgccgtgagtgatcatgcagcgtttcggattgccggttgtacctgaggtaaacatcagcaatgccgtatcgttttcagacaccgtttcgacatccggtgtatcaccggagcctgtcaataaagcgtcaaactgaggcgttgtctccgcagctgttccggtctcgaccttcagtttaagagaagataccagcgcaggaagcacttcttccatgatctctttaaattcagtgccgtaaaaaacagctttcggttcacaggctgctaaaatgcctttcatttcgtaaggtgttaattgccagctgaccggcacaaccaccgcgccgatttcgagtgccgcaaacatgacaatggatgccgcgtggccgtttttgcaaagcatcgccactctgtcgcctttttttattcctttatcaagaagcgcttgtgcaagctggttgattcgttttcgatattccgcgtaggtcagggtatacgcaccgctttttacagcttcgatctcttcgctatttgaaatgtcatgcagaatcagatgctgtaatgtctccatattttcatctcccataatgataaatcaaaaaaaactctgtcagattttctttctcacgcaacccattttaaaccaaaaaatataacttgtaaaactattttgttttagaactattccatcagtgaatgatacaatagtcccgtgtttttagtttcttcccttccccttaccctcatacatgcacaaaaaaacacaccccacatgaggtgtgcgcttcctgtttaccgctgtcctttctcctgaatgaaatgataaaacagcttgtttaaacgtttgtataaatcggcctcatcctccgtctggaaggcttttatactgtcttcagactcgataatggccgagctgaccgcacttagtatttccgacccttcagcgggcatatcagccggcgccatcatcaccaaagcgcggtcgacggtcagggaatttccgtccatgcctttgacactgcatggagctgtcaaatcataaattttgaaaaaaggcgtgacaatttcttcatttttgagatggtacagggccatcgccgttcccggaatgccgagtccgccctgtcgttcacgctcagcaaggcgctgtgcggttttttgggcattatgaaccaatccttcttgctccagcatgtcaaacatacggttcaaaaacagctcatacgccgtgtttgaatcaatggatttgatcgaaaagttccgcagcacgctttggataaccgccgcgtaatgcgccatacggccggccgcttccagcatatcaggcgtctccggctgcttctcctctctttcaccgtttctttttttgtcaagaatcagcggaatttttcttttgatgtactgcttgacctgatcagcgtcttcttcgtttaaaagcggactgaccatgacgtaatcaatgttttcatacgggatcggaacggtggatacgatcatgtcatacgcggtgatgtctcgatccttcagttcgatgagggaagacatatcaaaggaacggatttccgaaagctcttttttcagcctggatgcgagcattttggacgacccgatgccgcttgaacagacgatcagcgctttgatcttcgcttcttcccgtttgatttccaaagcagagccgaagtgaagaacgatgaaagcgatctcattatcagagaaaagaagccccggaaagaatttttccattccttcttctacggccatgtacagcaggaagtagtcgcgtttaatttgctcggtcatcgggttgtacatgtcgatattttcttttacccggttgatcgcaggctccagatgggcgattaaaccgtcgtataaagaaccgttttccgtcagatcaattttaattttttcagaaatgaagccgatcagctgcttcgtttgcaaggccgtttcaacctctatgtcttccggtttgaattccgttttgtatttgcggttggcgctccgcaaatgaatggtgatatatccgatctcagcttccggaattgaaacgccgaacgctttttcaagctcttttgccatttccagcgcagagccgtactccttcgtctgctgcagcgcttttagttccgaagcctccatcgtgatggtttctccgagcctgatccggtccatcgcaaaggttaaatgaaccgcaagcgccatgtatgagctgtcagataaggcgatcgcgattttttccttgagctgaattaagagccggtccattttcaaaagttccgctttatttacgacgccgaacattttttcagcatcgtccggttttcctttaatattcaattcaaccgcttccaaaaagctttgaatatcaaggcggttgacgatgagattgccgacgattttccgtttcgcattttccggccccgtcagctgaatgccgaagcccctttttcggatcagcgtcaagccgaagggcgcaatccaagtctccagctcatccaggtcatagctgatcgtcgcgtttgtcacttgcagttcgttcgccagactgtagagcttgatcggctcttgagactctaatagtgaacatagaattaaaagtttccgctcctcagcgctgtattcatgctgttcataggacaggtctgacaggagtttttgtttgtcctccgggtttccaaccgctttcagtcctttgccgggctgcttatcaagtgccagaccgaatgattccattatcggtttgattgtttttaactcgcggtgaacggttcttgtgctgacttgtaaagcttccgccagttcatgcactgtctcgtaccggttctgcagtaatagatgtttcattaatttttgttctctcgctgtcatatacatgaaacgcgcctccagattttctagttgtgagaagtatggcatatggggagtgctgccggggaaagtggtgtaagttataatataaaacgctttcaatgattattcaaccattttcaaatggcaatttggcactgggccgtgtgacagtattgaaaaagaaaaatgtgtcagataatatgccatgacgcttgttactcttgatccgcacggctatacttcaaagtgaccttacttgtttttagacattgcacaccacataaacaaacgcccggaagatagcttccgggcgtttgttctgtttatggaatatcgcagccttggacaccggtataaatccggaaccactgatcatggctgagtttgtacgcggatgcacgcaccgcggcggaaatgcggttctcttttccgctgccgacaatcggcatgatgtctgccgggtgggtgaacagccatgcgtacatgacttcgtcaatggaagcggcgccgatttcttcctgtacggaacgaagcgcggcacggatacggacgtccttatctgattgtccggtaaagacgctcccgcccgcaagcggtgaccacgccatcggcggaatgcgtttttcctgacagaaatccagcgtgccgtcatgaatattttccagctcgtacgccgagatttcaatttgatttgtgatgagcggatcatccaaataggattcgagcattctgtactggtgcgctttaaagttcgatactccgaaatatctgacctttcccgagcttttcagcgcatgaaacgcttcagccaccgcctccggttccataagcgggtccggtctgtgaatgagcagcacatccagataatccgtattcagattcaagagcgactgctccgccgacgctaaaatgtgagacttcgacgtattataatgatgcgacttgtttccgggccgttccggtgattcaatgacaatcccgcattttgtgacgatttcgattcgctcccttattgaaggcgaaagggacaaagcgccgccgaacagcttttcacacgtataaccgccgtatatatcggcatggtcgaaggtggtgatgccttggctgatacaccattcaatcaaattcagcagctctccgtctgaaacattccattcgttcagacgccaaagcccgtgtatcactcttgaaaattccaggtcttcagccaattgaatgcgctgcatgtgaaatccccctttttcttagagcctcttgtatctctgttttcaggaattgcccatgctgtttcattctgcttcggcggccgattttcctttcagcccgcgaaaatcgtcatttaatgattctgaaactgctttttcgctttttcaacgacgtaatggcttccgccgcgttttttgacgtcttgaatcatcatcgcgatcaagaggtctttctttttataatcgtaaccgacaaaccagccgttttctttgccgtctttatcttctttagacgttttcagctcggctgtaccggtttttccggctacggtaatgccgcttacggccggctgatatgcagagccgcgcggatcttcaacgacgcctctcagcccttttgtgatttcttcggcattggctttcgataccacttgcttatgccagatttgcggtgttttttctccgtctttgatcaatgtcggtttgacgagatttccgtctgttacaaatgcggtatagtcagccgctaagtgcagcggagacatcagcatctgcccctggccgtagcccgtatctccgagaaggatctcggaatcaagcttgccgttagcgattgaagacttttcaatcggaaattggtacggaatctcttcatcaaacccaaatgtttttaatccttttgtaaacgcgtccgctccggcatctatggcattttgcgcaaagtagatgttgtccgatgtgatcagcgcgttttcgagatccacttcattcaggcgctctgatacgcgtgtgacatggtaaccgccccagcttgaatctttctgccactcttttccggtgatttttttcttttctgacgctttcaatgttccgtttgtcaggccgactgccgcggcaatcggtttaatcgttgaacccggcgcataaagtttgttgaatttcgctgaaaacggattgtttttatcttcattcagctttttccattcttttccgccccagccgaaaataaagccgttcgggtcataagatggtgcgctgacgagcgcgagtgtctctcccgtttgcggttcgagggcgactgccgctccgctgtcatctttcatagaatcatacagcttcgtctgcgtactcatgtcaatcgttacatgaatatcctgcccgctttcggctttcttttcagcaatgacctcacctgtttgcgggacgtaaattttccagccggtcgtgccgcgcagcttgtcttcatatacattctcaaggccggcgatgccgattttggaagtatcgctgtattgcccgtctttcgcttttttcagctgctccgctgtgatggttttaatatagccggtcagatgggccgctttttcgccgtacggatagtagcgggagctgactttcgttttcgtcacgccgtctaatgcgagcaggcttttgaccttgctttcatcatccggtctgattttttgaatcgggacataagagtcgtcttttacccagccctggttcagtttgcttttgatatcgtcttcagaaaggtccagtttttcagacagttttttgatcacgctgtctttatccttgccgagttttccagggataatgccgatttccggcacctcggtatttacggcgagaccttttccgtctttgtcgtaaatttgtccgcgcttcggttcttcatttgcgatctgcacggttttgtcatcggaaagctgtttgaaaataaaagaaggattccagtcgatgttccatgattctccatcgtctgttttttcttttttcaggacggccgtgttttcaaaagcgaccttccctgcttttgtatccatgctgactttataatcgatgtgctggaggtcatcttttttcttgtcgtcttcgtcctgtttttcggcagtgactttcagatttttgacccctgcttgttcataaacggtttcatatcgctttacaaaatcctttttggatcgttttttcttttcatcctgggtgaggctttggtacatcttatcgtagtgaccgccgttccagtcttttacgaaatctttcattctgtcttcggccgattccgttttcgagcagccgatcaaacctatgattcctgcgagtaaaagtaataggtataacccttttttcactgtctattcccctgccttccaactgttattttctcctaaaccaaatcaggctggcaaggatttttttctcatattgtttaaaatttttttgtttttcctgccgtcacgggccatattcttatacaatgtatctattaaaaaaagggggaatttcagatgatcaaagaagcagccatgctgtatgtaaaagaaggtcttgagggggaattcgaagaggcattccgccgggcggagccgattatcgcgggcatgaaaggttatctgtcccattccttgtccaaatgtatggaaaagacgcataaatatttgctgcttgtggaatgggagacattggaagatcatacaaaaggctttcgcggatcgccggaatatcaggaatggaaagccttactgcaccgtttttattcaccatttcccgttgtggagcattttcaggatctatcagcctcagatcgcgtgaagcgtaaaaccgattaaggagatcgaccatacaaaaacggcggtatagatattgaatttcccggagccctcgttttctttccgtttttcctccagcccctgaatgaacatgaccgcaccgagaaacacgagcataaccggctgtatgacagaggtatgttccgcatacgtaaatgcggcggccgcaagtataataatcagcatcgcgagtgacagttttaaggcgcgcagcaaagcaatccatcctttctgttatcattttttgaacacaattctatttctgtctttatcccccattattctagcgtattttttgcgcggatagaacgaaagtcggacaattttaagtttgttttaaggagcacgaaaagcgcgctcccgatgaaaaggagcgcgcggttatgagccggcgaggcttccgtatccgagcccccgcaggacgcatgccatgacttcatatcccttgctgttggggtgtacgcggtcatgagagagatattcattcatttttcctttgaaagcgctgtggacgtcggcgattttgacgtacggcgccgatgcgagtgtgctgaggtgcgcattataagaggatatccatttttctgcaatggagattcccgggaaaggattgtataaattgaagacgcggatctcataaggagacgggtgcggcccttttaaggcggcgatcttggcaatcatcttttcaaagttctcatggcagtgaccggacacgccggtgaacaccgaagcgtccgatgtttgctgatatgcctgaaccgaatcgatcaaatcgttgccgcagcctgtaatcgtaatcatatcagcagcctgaatccgcctctgaatgtacggcaaggacataagcccgagaatttctcccgtctcaaggcctgatttggcaaagatggatacgtcggttcttgtctgtaaatcttctgccatcatacgcccgaaccgctggacaaaaccggcggaaaacggcccggatcccctccccgtcgtcaaagaatcccccagcgccgtataaacaagtcccatttactttcctccactcgttactatcgatattgtaatgtacgcgagtgaagaaaaattggctcggtcaataacccaatttctcagaaatatgctgtgcagcggttttgaccttttcggttaaatacggcagcctgtcctctgaaaaccgggcttcgaagccggcgatgctgattccggcagccaccttaccttcatgattgaaaatcggcgccccgatcgccgccgtgtaatcttctaattccgaatagctgatcgtataacctgattgtaaggacctttcaatggattgaagcagttcagcctgatccgtcatcgtgcctgaggcgattgcggcaagctttgtcttctgaatgtatgtgtcaatctcctcttttggcagaaacgatagaatgcttctggcgcacgctcccgcgtacagcggcgaccggcggccgattgccgtatacaggcggacggtttgagtgccttcaattttttcgacgtaaatggcttcatctccgtccctcatgatcagctgaacggcctcatccacttcgccgcacagctcttccataatcggtttggctattttcctgatgtccagacgttcagagacgagctggccgaattgtaaaaagatcagaccaagctgataacggccgtccgctgcccgggtgagaaatcccgtttcctccagcgagcttgccatccggtgaaccgaggtcttcggcatctccgatagagaaaccagttgatttaagctcaggctcggttcagtcagaaacaagtgaagcagttccattgatttgatgacggttttgtttttgttttccatggtctttagcccctttgtcagatcagccattccattttgagccttgctttcagctccttcagctgctgttccttctctaaaagcagcatttccgcttcctccagcgaaacggcccggaacgtgatatgttcccccggcatcgtttgggcgacgagaggaagatcagcggatatgatatgcgccatccgcggatagccccccgtcgtctgtctgtcagccagcagaataatcggattgccgtccggcggcacctgcaccgttccgaacgtcacggcctcagataccatctccagcggctcccgcaattcaagcggagcgcccttcagccggtagcccattcggtcggattgaggcgtgaccatatatgactcgtgataaaaacgcaattttgcttcttctgtaaaagcgtgaaattgagcgccttcaagcactcgtatgaccggattttttttcagcggcagaaatcctctgctgctgacagaccaatcaggcgctgagaaaccatgctgtccgaaagaatcgctcagacggtacgcgattgattccgaacatggcgtcatacggccgagcggcagctcatcatctttttgcagcgctcttccgcaaaagccgccgatccccgctctgacatacgtgcttttgctttccatgacggcgggcacgtcaaatccccccgcgacggcgagataagcgcggctccccatcttgcatggcccgaatgagacgacgctgttttcctttatcaaaaccggtttccacagaggggcgggctccccattaatatgaaaggcgaaatcagctcccgtgacggcaataaccgcaggttctgaaaattcaaaggaaggcccgggccccatgagcgtaatttccagtcccgcctctttttcttgatttccggcaagaagattggcgatgcgcagtgagatcgtatccattgcgccgcttcccagcacaccgtatttctgataccccgtccgccccgtgtcctgaaccgtcgtcaagagaccgggctttaccactttcatactcattcggctccctccttgatgcggctgtactcctctgccgtgatccggacgaatttcaccgtatcgcccgctctcaatagactcggcggatgttcttccggcctgaaaagccggagcggggtgctgccgatcagctgccagccgccgggagtggatatcggatacacaccggtctgcattcccgcgattcctactgaaccggccgggatggacggccttggcgacgcctttctcggcgctctgatccgctcagacattcctcctaaaaacggaaatcccggcgcaaatccgagcatataaacgagatattcgccttcagtatgaatgcggatgacgtcttccggggtcagatcgttcatctcagcgacctcttctaaatcgggaccgaaatcaccgccgtagcaaacggggatttccatcacccggcgctcttctttgcggccggtcattatatggctgagacgttctgtcacttctttcttgaccagggcaaaaggagagacgcctttttttatgtttgagacggcatacacatcataaaagatcgttaagcttgtgaatgccggaatacattcaacgaagcccggaaacggccgttcttccatacaggctgccgccgcatgcacccggccgttgacctcttcgctgatgtgcccgccaaagcggatgataacggcggaatcaccgtacggctgtatatcaagcgctgtatttccgctatactgcatcattgtcatcacctcgttgtattctttctcacttacaggacagcaagcgattcatttcgtatatcggtgatcagcatgtgccccggtgaatgtgttattacgatgtcaggctttgcttccatgatcaccgcctggggcgtaacgccgcaagcccagaatacgggaacttcgccttcccgcaccgttacggcatctccgaaatccggctgatgcaaatcgctgataccgatgctttgcggatttccgatgcggacgggggcgccgtgcacggcgggaaaacgtgacgtgacctgcgccgcgcggactgcaagcctttccggaatcggtctcatgctgacgaccatctttccagaaaacgggccggcgggaacacagtcaatgtctgttttatacatggggacattcacaccctcatcgatgtgcctgattggaatgtgctgattaataagggcttgctcgaatgaaaaactgcagccgattaaaaacccgacatcatcatccttccaatacggcgtaatatccgttacctcttcagtaagcacgccatgccgataaatcctgtatttcggaaagtccgtccggatatcagctcccggcgcagctattgccggaacgggtgaacccgcatccgtcacatcaagcaccggacaaggcttttgattgcgctggcagaataagagaaaatcaaaggcaagatccttttgcaaaacgacgagattggcttgtgcgtaagaagcggccatccccgccgtcggcccgatcatctgccccttcctgatcagctgtctgacttcttcgggactcatgtcactcatatgttttttcatatcatcagctccatagctgcggcatctgcgtgaataatgtatagatgcccataaccgccatgacaaccactacgatcgcccctgcaatcgtgagccagatcggatgcttgtaatcgccgacgatttttttcttataagcgcccaacagaatcatcgctaatgcaagcggcagaattaagccgttaagcgaaccgacagcgaccagaattttggcaggctggccgatcgtaacaaaaataagagtggatacgatgataaaaccgataatgacgccatgtgagtgcttttcgatttttgttgaaaacgatttgaaaaatgacaccgatgtataggcggcgccgatgacagacgtgatagcggcagaccacatgatgacgccgaaaattttatagcctacatttcccgccgcaagccggaatacagaagccgccggattttcaggatcaatgctcaggccctttgagacgacgccgagcacggcgagaaacagggcaatccgcataatcgatgtaatcagaacgcctgtgatggagcttctcgtaacctgagggaggacttccttcccttggatgcctgaatcaagcaaacggtggccgccggcaaatgtaatgtatccgccgaccgtgccgccgacaagcgtcacgatcgccagcacactgatatgatcaggcataaaagttttcacaacggcgtgtccgaccggcggagccgtcgttacggcaacatacactgtcaatacgatcatgacgattccggcgatctgcataaaacggtccatgacttttccggcttcctttatgacaaaaatcagcaccgcgaccgctgcgctgattaaagcgccgatctccggtttgattccgaataatacttgaagaccgagacccgcgccgccgatgtttccgatattaaacgcaagtccgccgagcacgaccagaaaagcaatggcataaccggcgcccggaagcaccatattggcaatctcttggccgcgctttccggaaaccgcgataatccgccatacattggtttgcgcgaaaatgtccaaaataatagaaattaaaatgataaagccgaagcttgccgccaatgtattggtaaacgtggccgtttgcgtcagaaagccgggcccgattgatgatgtcgccatcaaaaatgtcgcgcctaaaagaagcgaccatttgccggaagcctttccggctgtttttttcttttgctccatgctgtcttcctccctctgctgctcagtcttttgaaagcgcgctgatttgaatgtctgccgcttttaattcttttttgattgtttttgcgaatgtgagggcgtgggctccgtctccgtgaatgcagaccgtgtccgctttcaggcttacagcttgtcccttacgtgatgtcaccgtgctgtctttcaccatttgaatcacttgaccgaccgcttttttgtcatcctgaatcagcgcatccggctctgaacgcggcgtcagcgtgccgtcttcctgataggtgcggtccgcaaacacttcgcttgccgtcctcagtccgattcgatctcccgctttaatcagctcgcttccggaaagcccgaaaagaataagcccgggatcaaaatgacagaccgcctgagcgatggcttctgacaggccgggattgacggcggccatattatataaagcgccgtgcggcttcacatgctgcatctcgacaccttctgcttttaaaaaccctgacagcgcgccgatttggtacagcgtcagatcatacgcttcctcgggtgtaatcgcgatctgccgccgcccgaatccctgcagatcgaacagcccgggatgagcgccgattttcacgcctttttccgccgcaagcgcaaccgttttgcgcatcacgctgggatcacccgcatgaaagccgcaggcgatgtttgcagatgtcacataatccaaaatctcttcatccagcccgattttataagcaccgaaactctctcctaaatcacaattgatgtcaatctgaaacataagatccctcctgtattgtaaacgttttatatgattatcattccgctattcggaatgactattccgaattgttggatttctcttcattatatttatttctgacaggtttgaacatccttttgtcagaaaacctaccatggacctagtcacaaatctgacaaaacaaaaaaaaagagagtctcatactgagactctctcttttttctattataacacccagtggcggatcgctttggcgaccccgttttccgtgttgacatcagtcacccagtcagctgtttctttcacaatgtcctgcgcattccccatggcgacgccgacacccgctttttcaatcatggcaatgtcattcagactgtcacccatggccatcacattttccatcgtgaagccgagtttttccgataccttcgccagcgcagccgctttgttgataccgagggcattgacttcgatgttgatcggactggagtttgtgatctcgagctccttgtattccttgagctctttcagcacctcattccgcacttcgtcatcctcgatttcgaacccgaacttgagccactgatgatccgtaatcgtttccgggaattcccctctccacactctatcgacggtagaggcccagaaattcgtgttgtgcttattccttagatcccataatttttgaatatgatcggtatgaagaagcttgcgctcaaccagctcaaagtcggaatcccagatttcgctgccgtttgccgtgattaaaaaggatgacagctcgagagactcagccagttcgcggcaggtcatcagcgtgcgtcctgtgctgatgacgacgtgaattcctttcgcctccgcttccttgatcgcccgccggttttcctccgggatgagctgctcgtcattgagcagggttccgtccatatcaatcgcgatcagtttaatatctgcgtcttctctttgtatcggcatatatgtacctcactttttataatgtagtcgtctctattttaatacatatgacccacaggaacaaaaaaccgtttcatgcgtttggcggggagaacgttgaggaaaagaaatattgaggtgatggaggatgaaagaaagaaaacaaaagaacaaaccgaatgaaaatcctgaacatcatgatttaaccgatccgattccgctggaagagctgaaggaaaacgccaatgacgaaaaacacaaacatgaccaaagggacaattcacaaagtgaaagagattatgatacaaaataacaggcttgtccgaaagccgccgctggaggcggctttttttacgatggctggatatatatgctgagctcagcttccgccacaggcttcccggcaacagacgctttcgcccggccgaacacaaaaccgcgtctgattcgcgtgacctcaaaaaaaagatccagacggtctcccggcaaagcggcacctaacctttccgctttcttcaccgcggataagagaccgaggccgtcaccgccggtaattcccgcgcaagccgccgtttgggccattgcttcaacgacgagcgaaaatggcatctctctttgggattcagttataaaccagtcattttcactgatgtttttgtaagcagccgcccattttccggcttcactgttcgtcgtgccgtcaatcaaaagaaacggaaaacgatggggcaatagcttctgattcatcacgcagcctcccttctctctcattataacgcaagaaaaaacccgcgtcccccgacgcgggttcatttttattgattgagctttttgagcacgatgccgtgcagcggttcatgcggctgaataccgcaaatgtcttgaagaacgccgctcgtgcctttttccgcgataagcttttgcagctcaaccgcttccggatcatcctgatagtcaaagcgcagggcggcggcgatgccttctgccagcgcgttcggttcttttatttttttggccggccctactaatctgtcattcgctccgagttttctgagcggtgatctggcgactcttgtcacatcatccgtgatgtattcattttcaaagcggccgatgattttcttcatgtactgctcgtgttcggcttgcttaaagccgtacgctttcactaagtactcgcccgtttctgaaagtgcatcgtacacgacacgccggatttccggatggccgatggcctctttgacggtttttaatccgcgctgatagccgacgtacgccgtaacggcatgaccggtattgacggtaaacagctttctctcgatgaaaggcgtaagatcatccgtaaacaacgcaccttccagtaccggctggccgccggcaaagccggttctgtctatgacccattcaaaaaacggttctacggatactttcagcggatcttcatggtgctgaatcggcacgatccgatccaccgcagaatccgggaagccgaccgtccggttcacgagttcccgttccgcttccgtcaaatgtccgaaaacttcttttttcagaaaactgctgccgccgatcatattttcacaggcaatgatattgagaggttcagaggacgttctgcgcttcagcccttccgcgatggacggggcgatgagtctgagaacgttcgggcccaccgccgtcgtaatgatcgccgcttcattgatcagcctgtacagctcttgttcttgcaccgcgctgttgatggctgaaacggggccgatgatttcggtctgccggccgccgtcggcaagctccacggtatattccttcttttcattgagaaggctgaccattgtttcattcacatcagcgaaaactacctcatagccggaatgatggagcagggcgccgataaagccccgcccgatgtttcccgctccgaaatgaagggcaatcatgtcagttcacctcgctgaaaatagcggccagttcttcttccgtctttgcactgatcagccgctcgatgttttcttcctctgagcagatgatggcgatgtttgacagaatgtctaagtgttcattgttttttccggcaataccgaaaacgacctttgccgtattgccttcaccgtattccaccccgtccggaatctggatgacggaaatgcctgaatgaagcacctcatccttcgcatcttccgtgccgtgcgggatcgcaatgaaattccccatgaaagtggatgatgtttcttcacgttcgaacattttttccacatagccgtttttcacgtaaccgttatcaatcaacgtctgtcccgccaggcggatggcatcctcttttgaattcactgtctggttcagtttgatgttcgctttagccaatacttccatgatgaagatccctctttctgtttgattagtttttaagcttttcaatcagttcatcgtatttcgggctgttcaagaaattatcaaccgaaatgtgcaccgcctgcggcagcttcgctttcgcacggtcagtcaggtccttatgcgtaatgacgatatccgcgtcattcggaagattattgattgatgtatttgtcacatcaatgtcaagttctgcttttttcactttgtttcttaaaatggaggcgcccattgcgctcgatcccattcctgcatcacacgcgaagataatgcggcttacttggtcagctgaaatatcagcggcgttttcctgttcttcctctttgtccgccaatgcggctgccgcttcgcttttcctgcctttcatttcctgcattttttccgcagcggctgtcagatcttcttctcccgctttagacgatttcagaataaacgccgagacgataaacgataccgccgcggcaacgatgacgcccgccagcacgccgagatagcttcctttcggcgtcagcgctaaaatggcgatgatgcttcccggagatgatgccgcgacaagacctgcgttaaagatcgagaatgtaagcagtccgctcgctcccccggcgatcgccgcgaggatcagcatcggtttcattaaaatgtaagggaaatagatttcatgaatccccccgaagaaatgaatgatcgccgctcccggagccgtcgatcttgaagagcctttcccaaagaacatatatgccagtaaaataccgagtcccggtccggggttcgcttccactaagaacagaatggatttacccgctttggcggcctgctcgattccgatcggacttaaaatgccgtggttgatcgcgttattcaggaacaggactttcgccggttctacgaaaacgcttgcaatcggcagcaaattcgcgtggacaatgacttccacacccgccgccagcaatttgttaagagacaggacgaccgggccgatcgcataaaacgcgataatcgtgagcacagctccgataattcccgccgtgaagttgttgatcagcatttcaaaaccctgtctgactttatctttaaatacacggtctaattgtttaatgagataaccgcccaaaggccccataatcattgcccctaagaacatcggaatgtccgctccgacaatgactccgatggccgccgtcgctccgacgactcccccgcggtgatcgtaaatcatttttccgcccgtatatgcgattaaaagcggcagaagatacgtaatcatcggggttaccaatgtattcagctgcggattcggaaaccatcccgctggaataaacagcgcggtgataattccccatgcgataaaagcgccgatattcggcatgatcataccgcttaaataactgccgaaccgctgtatcttcactttcatgccagcttgctgttcttgctgcatgttcattccctccctgtttgcttgccttcagatgaaaataaataagacacggggtttctctctctcccctgtgtcttcatcataaaacgcttccaattctcattcaatgaaaagtaaagaggagtttggcacagagactgtgacaactccttaacaaaaaaaagacacctcatcaaaggtgtcttaccgctttctgtatataatgtgtccttttgtgacaacgagtttggcaatgagccgctcactgacaataaacaccggatacgcacatacgagcgcgaaaatggcggccggcacataccgtgctgccggaaacatcggcatgacggcggttctggccatctgcacaagataaatcaaaagcaccgtgatcgcaatggccgcagccataatcggagctgatactttatattcacgcaatttcacatggcaatgcccgcactgaaactggcacgggatcatggatgatctgaccatgtcgcctgtaatcggcttgccgcagttcgggcaggtcgtttctttcatgtttattcctccattcaactcttctattataacagagtctgactacgtcttttacatttgtgattgttcaacattttttcacatattttatcatcaggctcttgtgtgcatatgtgaaaacatctactcttagagggaggttcatcactcattcgcataaaaaggaggatgcagaattgcttccgattcacagacagcaaaccttgcttgaatggctgaaagaagagggcgcgctgaaaatctctgacataagcgagagattcggcgtctccgagatgaccgtgtacagagacgtcaatcagttggcggatgcaaaccggattatccggacacccggcggcattacgctccctcccgcttcagaacgaagcgccaatcaatgcggctattgcctgcggccgattcagcattcgtattctgttcagcttattaccgtttcacaagccgttgagcagatgtgctgcattcattgcgcgattttgcggtatgaggataaaaaggaagaagtgtcccatgtcatttgtaaagattttcttctccagacgacgctgacggccgcttccgcatactttttagtccatgccgatattgaccttcactgctgccggcctcaggcgattcccttctcaacgcttgattacgcagaacggtttcaaaaaggattcggcggggtcatttgcacctttgacgaggcggcggacattatcttacacgacaggcagaagggatgcacctgcagcaagacataacaacaaccaaccggaaggcggtgtcatcatccatgagacagaacaaacgctggctcatctttttgctgttccttgttttgattccgaaaacaagcttcgcccacgcctacatcacaaactcaaatccgggtgagaacagcgaattaaaacaagcgccgaagcagattgaaattgagtttaatgaacagattgaagaaggcttccactccattaaggtctataattcatccggcgaacgggtcgatgcgggcaaaacggtgattcaaaaaaatgatgcccgcatcatgaccgcggcattgaaaaaaaatctgccgcatgatatttacagagcggaatggaacgcggtatcggccgacggacatccggtatccggcgtcatccctttcagtgtcggaaaagccggcggagaacttcaggagcagacatcatcgcaagcggcgcttcatcccgaagcggccatcgaccgcggtattttgtacaccgctctctccctgtttatcggcacggcttttttccatctgttttggtacagaaataataaagattcatcaaaagcaaaacgaactgtaaagctgctcgtgatttctttatgtgtaacggggctcgcacttatctgccagctcccgatccagacgaaagaaaacgcgggcggcgcttggagcgccgcgttccagccggactatgtaaaagaaacgcttctgaaaacggcaggcgggtacgtctggatgatccagatcagcttatttatcctgctcgccctgtccatgatcccgctgttgaagaagaaagcattccggtcatttgcgtactggacggcgccgctgttgttcttcttcgcttcgcttttggcaaaagcattcgccgggcatgcggcggttatcgacgaaaaagcggtcggcatcgcgatggactttctccatttatcggccgcgtctgtatggatgggcggtatcgccgcgcttgtgctgcttctttcatcagagtggagaaaacccgataaaaccatcgcttgggaaacggtcagacggttttctccttgggcgttcgcctctgtcggtgtgctgttattttcaggtgtgctgaacggatttttcattatccgcacgtttgattcactctttcacaccgcttacggtaagacgctccttttgaaaatcggactgtttgtcatcatgcttgtgctcggcgccgttcacgtatggatgacgaagttcagcagaaaaaggagcatcagcgcaacgataaaggccgaatgggcactaggcatcgcggtattatttacaaccgccgtcttcacaagcctgcccagtccgccgccgcctgcgccattgccttttaacggctcagaaacgatcggaaacggggaaaccctgtccttgcacattacgccgaaccagccgggtaaaaatgaatttcaagtcattgtcaccgatcacaacggcagcttggtaaaagacattcagcaatttacggtcactgtttaccagacgggcttcagcggcaaccagcatgaaagcacctttgatttgaagaagacgaaagaaggcacattcgaagccgccaacctgtccatcaccgaaaagggaaactggaagatcaaagtccacgggctgacaaacgattttaatgaaatcaaccaaatattctcaacgacaaactaaggagtgtatctcatgttgaaaaaaaaggctttattattcatatccgccgtgaccctgtcactcgtcggttttacggctgcagcaagcgcccacgtctcagtcaaaccggcggaatccgcggccggttcttgggaaacgtacacgatgaaagtgcctgtggaaaagaatgagccgacaacgaaagtcgtgctgaaaatgcccgccggcgttgaatttcagcagtatcagccgattccgggctggaaaacatccgtatccaaacatgatgacaaagcggtctccgtcacttgggaagcaaaagacggcggcattcagcccggccaattccagcagttcacgttcgttgcgaaaaatcctgaaaagagcggagatgccgcttgggacgcttaccaatattacaaagacggcagcattgtagaatggacgggtgatgagaaagccgacacgcctcactcgattacgaaaatcacgaaatcggccagcgtgacggatgcgcacggagctgaacagtcaaacgaagaaagcaaatccggcgtatcagcgcttgatattgcagccatcgttctgtcagctgcggcgattatcctttccatcgcggcgcttgtaaagaaaaaacgcgcgtaagcaaaaagcgatccggctctaaagagcctgcgatcgcttttttttcttatccgcggcctgcctggaatgacggatatttggtcattcccccgtcagcaaacagcgtaatgccggttacgtagcttgattcctttgaagcaagccagacggcgacagccgcgatttcttccggctcaccgatatatcccatcggaatcatgctttccacatcttttctctgaacgggatccgcaaatttttccgcgttgatcggcgtattgatggctcccggcccgatgttgttgacacggatgcgcttcggcgcgtactcaagcgccagcgtttccgtcatcaatttgatgccgcctttactcgccgcgtagtgaacaaacagaggccacggaatcatttcatgtacgcttgacatgttaatgacgtttccttgaatatcattctctacgtaatatttaatggcttcgcggcttcctaagaaagcgccggtcagattggtattgatgactttgttccagtctttgagcggcatttcatgcgactgaaccggattttccataccggcgttattgatcatgacatccaatgtgccaaattccttcaccgcggtctgcacgatgtttttgacatcttcttcttttgtgacgtcgccttgaatgatgaccgcttcgcctcccgctttttgaatctcttctttaacggtttgggcgtctttttcattactatagtagttaaccacgactttcgcctgctcctgtccgaagcggatcgccatcgcttttcctaatcctgatgaagctcccgtaatggcaacgacttttccttttaaatccgtgtacatgttcaaacctcctgcatttgttatgaatttgatttcgcaacgcctaagaataccgcggccacaatgatcaggataatcccgatggcaatggcgaccagctgacgcttcgttttgctctcacggagaatgaagattccgccgagcgtgctgatgacgatccccatttgagagagggaaaaacttgtcgcgactccgacgcgcggctgtgagatgaacagaaacatattcccgagcgcccagatgattcctggcagaatgttcttgagggcgtacttattaaacggtttatgcttgtacgtcaggagcagcccgccgatgaccatcccgatcgcctgcggcagaagcgctgaccatccggatacgccgaacagccgggccacaacgacatagaccaaataaccgagcgtggagatcagcaggatgacaatgcctttttttaagtttcccggttctccgtccgcccgcccctttttatcttctaaagatgtgagcacaatcccgatgatgataaaaataagggcgagaatacccagcgtaatcgcgatcggggttgaccattctttgaatacgatcacaccgaacaaagaagtcgagacgagctgcattcccgttgatatcggcatcgtttttgaaacgcccatcagctgtatgctttttagctgattgctttggccgagcgaccaaaacagccccgagatgatgccgacaataaaaatgcgcccagacagcaccgggtggacaaacagatacaacacaaacgaaacgatgagcgccccgattgtcgttcccagcgtctggctgtaaggcccgccgcctaatttgacgttaaataacacgatgctcccccaaaataaagccgggagaagagccagtaatatatccatgatggcgaccttctttcaatcgtatttgctgttattttgtctggaatcgaaccgattattcccgcaagatcaaaaaagcctgccggcgatattcaccggcagactgctcaataaaaacagccccgcttagaagcggggctttcttttcggctcattaaagtccgatagacatgtatttggtttccaggtacggttcaatgccttccgtaccgccttcacggccgatgccgctttctttcattcctccgaaaggcgcttgaaccgcggacggaccgccgtcattccagccgatgatgccgtattcaagctgttcagaaatatagatgccgcggcggtagttttctgtgaagaaataagccgcaagcccgaacggcgtatcgttcgcaagcttgatcgcttcatcaatatctgagaacgtaacgatcggcgcaaccgggccgaatgtttcttcatgcatgatgttcatggatgtatctacgtttgacagcacggtcggcgtcacgaaatagcatcctttttcatcgttttggtcatacgttccgcccgtcagcacttttgcgcctttttccacagcgtcattaatttggccgacgattttatcgaagccttttttgttgatgacagggccgacgtttacgcctttttcaagaccgtttccgactttgagtttcgcagcttcttcactcagttttttcgcaaactcgtcttttacggattcgtgtacgatcagccggttcgcacagacgcaggtttggccggcatttctgaatttagaggccattgtttgggctaccgccagatcaagatcagcgtcttcatccacgatcagcggcgcatgtccgccaagctccattgacatatgttttacggtgtcggcgctgtttttcatcaggattttgccgacaggcgttgagccggtaaaggtaattttgcggattttcgggctgctggtgaagacgtttccgatttcggctccgtcaccgatcaccacttgcagcacgtccttcggaattcccgcttcatatgcgagacgcgcaagggcgtaagcggaaagcggcgtatcctccgccggtttgatgatgaacgtacagcctgccgccaaagcgggcgcggcttttcttgtaatcatcgcattcgggaaattccacggcgtgatcgcggctaccgggccgaccgcctgacgggtgacgacaatccgtttgcccgttgtcggcgcaggtactgttctgccgtaaatccgttttgcttcttcggcgaaccattcaatatagccggcgccgtataaaacttctccgaccgcttcttcgtacggtttgccgttttctttcgtaattaattccgcaagttcttctttattttcaacaatcagctcataccattttctcagcagtgaggcacgttctcccgctgatgttttggaccatgattgaaacgcttgatgtgaacgttcaatcgctttttcaacatcttcagccgtctgctgggggatgctttcgatcgcctctcccgttgccgggttgtacactgttaattgttctggcatattgaacattcctttctctgctatagtaaagccattgaatgctagttgatgtatctcacactttcatgatagcagacacatccgccggcattccaataattgaactcacagagctgcttcgataatggaaaggccttctttgagctgctcatccgtcacgacaagcggcgtcaggaatctgataatgttgccgttaatgccggccgtcagcagcagcagtccgttctcgttcgccgttttggcgatcgccgcggcttttgctttgtccggttcccgcgtgtccggatctttgacaatttcgatggccgccatcgcgccgagtctgcgcacttctccgatacaggcatgctcttttttccactcaagcgcttgatgctcgatgatccggccgatctcctcggaacgctgattcagcccttcttcttcaataatatccaagaccgcaagcgcagccgcacagccgagcgggcttcccgcatatgtgcccccgagttcccccggcgcggcggcatcaagcatttccgcccggccgatgacgccgctgagcggcaatccggccgcaagtgatttggaacaggtgatcaaatcaggaacggctccgaaatgctcaatcgcaaaatatgttcccgttctggcaaaaccggtctgaatctcatccgctacaaaaacgatgccgtgtttttgacaaaaagcggcgacgtgctgcacgaaacgttttgacggaatgatgaagccgccttctccctgaaccggctccatgacgacacaggcgacggtttccggtgcaactgcggcgataaagaaatcctcaaaagcgctgatgataaagtcgtcatactgctcgtcgctcatgccggccggtttttgataatagtaaggaaacggcgcctgatacacctctgaggcaaacgggccgaaaccgaatttataaggcttcaccttgctcgtcatgctcatcgtcatgttcgtgcggccgtggaaccctcttgtaaatgacacgacagcctggcgcttcgtatattttctggcgattttcacggcgttttccaccgcttccgcccccgaattgagaaaaatggcttttttcgcatgatctcccggcgcaagggcgcaaagtttttcggccagttcaatataagacggatacatcatgacgttaaatcccgggtgaatcagatcctccgcctgtttcttcacggcctccaccactttcggatgggaatggccgacattcagcgttccgatcgctccggcaaaatcaatgaatcgtctgccgtccaaatcgtacaaaagcgccccttccccttttaccgccatgctgcggtttccattgccgacccccttggaaacgaattgatcccgtttttgctgccactgggcagttgtcacttccgatgatgctgttcgactcatagattccatccccctgcattgttttcttatcattctgacttctttttggtatgatgaaaagtaccaaaatcaatttatccatggtatcagaaaggggcagggtctggatgctgacgatttccattgatcattcggaaacggcggattatatctatcagcagatctatcagcacataaaagcggccgttttgaagcgcagtctgatgcctcatacaaaggtgccgtctaaacgggagcttgccgagacgctgaaggtcagcgtaaattcagtgaattcagcttatcagcagctgctttcggaaggttatttatatgcggtcgaaagaaaaggctttttcgtggaggaaattgatacggtttatcatgaagaaacgccttcgctcctattgcctgatgatttgaaagagcgggagacggataagagcggctggatttcgttttctcatatgagtgtggatacggcgcatttccccctgaaaagctggttccgctgtgagcagaaagcagccgcccgttcatttcatacactcggagaactcgtccatccgcaaggcttatatgaagtccgtgaaactatttcgcggcttatttccctgacaaggggcgttacatgccgcccggaacaaatcgtgctcggagcgggcacacaaatgctgatgcagctgctgacggaactgctgccaaaagacgcgctctacgccatggagaacccgggatatatgaggatgtatcggctgctgcaaaacctcgggaaaaaggttgcgacgatcagccttgatgaaaaaggcatgtccatggacgaaatcgaaaaacgccggccctctgtattgatcaccacgccttcccatcaattcccctcaggcgtgatcatgcccgcttcccggcggattcagcttttaaactgggccgccgaacagaacggccgcttcatcattgaagatgattatgacagtgaatttaaatatgacgccgatacgataccggcgcttcaaagccttgaccggtttcaaaatgtcatctacatggggaccttttcaaaatcccttttcccaggtctgcgcatcagctatatggttctgccgcccgggcttttgcggacgttcaaagagagaacgtatgacctgcaaacgtgcagcacgcttgcccagctcgcgcttaaagaatttatcgaatcaggtgaatatcagaaacatattaaaaagatgaagcagcattataagaacatgcgggaacgcctcatttcggccttggaagaaacattcggagaaagaatcagtgtaaagggcgccaatgcggggcttcattttgtcactgagtttgaatgcgcccgttcagaaaaagagatattggcacgggcggatgcagaacagctcgatctgtttgcgatgagccgattccgtctgaaagcgggaggcgattcaaataagccgcagcttatcctggggttcgcacgcctgaaggagagcgatattcaagaaggcgtctacaggctttaccgggcggttttcggcgcataaaaaaacccccggaattcggggacttatttaccagcggtccggttctgtctgcaaaatcgcctccagcaggccgggaaacgccgcttgtaaatcatctttgcgcagggaataataacggtgcttcccgtctatgcgcacttgggcgatccccgcttcccgcagcactttgaagtgatgggacagcgttgatttagcgacccggacatcagcgcaggttccgcacgttttttctgttgtttccgccaattgtttgaccagctctaagcggagcggatcactcagagcatgaagaacctttgtcagctgtaagcgttcggtttcaggatggtttggaatgttcatgagtcaaatgtaacacagatcatcggcgggtgacaatttaggcggtgagggtttttcctttaccattcgcagcgaaacatgttacagttagttcgataatattcgaactataacaaataaacccaatcaggaggaataacaatgatcgtcttacaggcttacatgaaagtaaaagcggataaacgcgaggaatttttaggagaagcgcaatcacttgttcagcattcacgcgcggaagaaggaaatgtgcaatacgatcttttcgaaaaagtcggtgaggaaaatacattcgttatgcttgagcaatggaaagatgaagaagcgatgaaattccacaacgcaactgaccatttccaaggattcgtggcaaaagcaaaagaagtgctgagtgcgccgcttgacgtcgtccgcacagaactgtcagagtaacgaaaggatgaatgacatgaacgaagtccttcaaatattaacagaccaccgttccatccgcagctacacagatgaacccgtatcggatgagcagctggaccttatcatccaagcaactcaggcagcgccgacttccattaacggccagcaatttaccgttattgcggtgaaagataaggagcggaagaaaaaaatatccgaattggccggtggccagccgtggattgaccaagcgcctgttttccttttattctgcgctgattttaaccgcgctaaaattgcgcttgaagaatataatgatacaccgcttgagatcacgaacggtttagagtccgttctagtcggagccgtagatgtcgggattgcgctgggtacggcaacggctgcggctgaatcaatgggactcggcactgtgccgatcggcgccgtgcgcggcaaacctgacgaactcattgaattgctgaaacttccgaaatacgttttcccggtttccggtctcgtcatcggccatccggcagaccgctccgcgaaaaaaccgcgtctgccgcaagcagccgttctgcatcatgaaacgtatcaagaagaagatgtaagaacccatatcgaggcctatgacaagcagatgtccgaatacatgaaaaaacgcaccgacggacaggaaacaagaaactggtcacaaggcatcacttcctactataagcaggtttattatcctcacattcgtgaaatgcttgaaaaacaaggatttaagacggataaataaacgtatcagcctgccggaacactccggcaggttttttctatttctcaaacaaaagcgttgacactatgtaaaaatttttgttaatattttcatcatatactcattggttttctgtgaaccgatgggttttctattgtgacgaaagaaggaatctgggcttatgaatgataagaaaacggatattctgctggcggcaagaaagcttttttccgggaaaagcttttcgtcagtttcgatgcaggcgatcgcagaggagtgcaaagtctccaaagcatctttatataagctgtttgaatcaaaggaagacctgctgttggagctgctcgactttaaccagaaacagatggtagccgccgcttcattattgaatgaagaaacaagcctctcccctgaggaacggtttgccaaaaaactgatggctgagcttgaaggcttcaggcgcaatcagcagttttttaatatgctgatgtacggaagcccctcttccattaatgaacgggtaaaacggcatattcacagggcccgctccacctttatctgctggcatcgcgattcactgattcagacgtacggcgaagacattattccttatgtatgggagctggtgatcgtcctgcaggggctcctgagagaatgcatcacgctgattaagctggaaaaagaaccgctcgccctggagccgctcacggagtttatcatccgccacctcaatctcatcgtcgaaaacaggacagccgaaaccgctttgcctcaggagatgattgacctttatatcgcctccgcttcctcatttgagcctaaagacaaaaccgtattgctggctgaaagcctgaaggaactgaaagaagccgtctcagcccttccggaggaaaaatatgacgccgcaggactcgcttccgcggcggctatgctggagaaagaatcagcggacaaacagccgcgggattttctcatcaaagcgcttatcggttatttggagcaggccggaccgctgcaccagccgcttgcagccgttaaaacattgctcaaactataaagaaagaaggaatcagcttgaataagagtattaaaactgcaccatacaaccgctctgtcattgtcgggattcttttggcgggtgcgttcgtcgccattttgaaccagacactgcttatcacggcgctgccgcacattatgaatgacttcaatatagacgccaacaaagcgcaatggctgacaacatcgtttatgctgacgaacgggattttgattccgattaccgcgtttttaatagagaaattcacaagccgcaccctcttgatttccgccatgagtattttcacggcgggcaccattgtcggcgcattcgccccgaactttccggtgctcttgacggcccggattatccaggcagccggtgccggaattatgctgccgctcatgcagacggtatttctcacgattttcccgatggaaaagcgcggccgcgccatgggtatggtcggcttggttatttcgttcgccccggcgatcggcccgacgctttccggatgggcggtcgaagcattctcttggcggtctttgttttatatcatcttcccgatcgcagtcatcgatttgcttttagcgattattctgatgaaaaacgtcacgacattacgagaaacacagattgatattgtatccgtgatcttatcgaccctcggattcggcggtctgctttacggcttctcaagcgccggttcatcagggtggaccagtactgaagtgctgacttcgctgcttgtcggagcggtcgcactgattttctttatcgcaagacagatgaagctcaaaaaaccgatgctggaattccgcgtgttttctttcgggattttcagcctgaccaccctgctcggaacgcttgttttcgcgctgctgatcggaacggaaaccattctcccgctttacacgcaaaaagtccggggcgtatccgcgtttgataccggattaatgcttttgccgggcgcgattgtgatggggatgatgtctccgtttatcggccgggtgtttgacaaaatcggcggaaagggccttgcgatgaccggattcttcatcatcctgctcacgtccctgccgtttatgaatctgacggactcgacgtctctcatttggattgtcgtcgtttataccgcgcggcttttgggaacagccatgattatgatgccagtgacgacagcgggtatcaacgccctgccgcgccacttaattccgcacggcacagccatgaacaataccgtccgacaagtcggcggttctatcggtacggcgctgctagtttccgtgatgagcagccaggccgcgcacgcaaatgcgacaactccggcaaacgccgccctgcacggcatgaatgcggcatttgtcgtagccgcctgcatcgcgctggccggcttcctcctatcttttatattgaagaaaaaaccgcgtcagcccgagcagcagcaggccgttacgcggtaaaccaaaaagaacccgatcacgtatgtgaccgggttctttttttacttctcgattccgtctttaacttctttcaccatttgcgccatggattccaggccgcctcctgataaataccatgtagctgaatcaaggtagacaacatggttgtttttcacggctttcaccgattttacataatcattttcaaccacttgttttgttgaagattttgtgccgatcgctgttccgcggtcaacgacaaacatataatcagggtttgttttggcgatatattcataagaaatgctttgtccgtgcaatgaggcttcgatgtttttgtcagccggtttgacgccgaacacatcatgaatgaagccgtatcttgatttagatccgaacgcgctgattttgccgtcgttcgccatcaccactaacccgtttttatccgtgctgcttgtctttttcttcagatccgcaatggatttgtcaattttcgcaagcttatctttcacttcattttctttgttaaagattttgccgatcacttcggtgttgtgcttgaatctgtcaacgtagtttgtatagtcatcatcaaggtaaatcgtcggcgcgatttttgagaactctttataagaatcagattgtctgtgagcgataatgattaaatccgggtcaatatccgcgactttttcaaaatccggttcttttaaaccgcctgtattggtgtatttatcacttttatatgaagataagtattttggaatgttttgtttcggaagccccgccacatgatcctgtaaaccgagttcatccatcgtgtccagcattccgaagttgaatacgacgacttttttcggattcttcggcactttgacgccttctttgttcaggtcatctttgattgtgattgtttcttttgatttgcctgatgttttgtccccgtttccgcatgcagaaacaacaaaaatcgtaacgagcgcaatgaatagcaatgcgaattttttcatgattttcacctcatctggtttttaagaaaagtacacaccgatccgctgactgtcaatctcttgaatctggatggtcatatcataaatatcttcaagcacggaggtttcaatgatctcctccgccggcccttctttgacgatccggccgtttttcagtgcaacgatatggtctgaatatacggatgcgaagttgatatcgtgaatcactacgacgaccgtttttccgaagtcttccacaagccgcttcaacagcttcatcatttcaacggaatgcttcatatctaaattgttcagcggctcatcgagaaaaatatagtccgtatcctgagcgatgatcatcgcgataaacgccctctggcactggcctccgctgagctgatcgagatatttatcctttaagtcatccagcttcatataactgagtgcctggttgatatgcacccaatcttcatccgtcagtttcccctgggaatacggaaatctgccgaagctgaccaggtctttaatcgtcagcctgatattgatttggttcgtctgcttcaggatgctgattttttttgccagatcgttgcttttacaggccccgatctcttgcccgtcgaccgtgatttccccggaatccgtcttaatcagccggctcatgatagacagcagcgtgctttttcccgcgccgttcggaccgataaatgaggtgagcctgcccttttgaatggatagagacgttttctcaaggacggttttccctccgtattgtttgcttacatttttgacctctaccatgatttattctcctttaacagcagatagataaaataaatcccgccggcaaaattaatgatgacgctcagcgtcgtggaaaacgtgaacactttctccacgacgaactggcccccgacgagcgcgacgatgctgatcaggacagaacccgcgattaaatacgtgtgcctgtaggtttttaaaaactctctcgccagattgacgacaagcagtcctaaaaacataatcggcccgacaagagccgtagagacagacacaagaatggcgacgacaatgagcatctgtttcacaagcttatcgtaatcaatccccaggttgacggcgtgctccctgccgagcgacagcacgtcaaaaaaccgcgtgaaccgccagacataaatgcccgtcagaagaaagacagcaccggcaaaccataaaagatcggtgttgatattgttaaagctggcaaacattttgtcctgaacaacctggaactcattcggatcaatcagcatctgcatgaaggatgacagactgttgaacagcgtgccgaacacgacgccgacaagcagaaggaaaaacacgttccgcccctctcctttaaacatgagctgatacaaaacgagtgacaagagcaccatcagcccgacggagatgacgaaattaagatttttgttcatcatgacgatattcattgaaccgaacaggaacacgatgacggtctgaatgagcatatacagggaatcgaggcctaaaatgcccggtgtcagtatgcggttatttgtaatcgtctggaagatgaccgttgaaaacgcgatcgctcctccggtgagcatcatggcaagcactttgaagcatcgtctcggcagggagtattcccaattgcccagtccgtagaacaggaagaatccgatacatatcatggcgagcgccgccagcagcgtaatttttttattatgactcatatgcttttctccttaacagcatatacaggaagatgccgctgccgataacaccgaccatcaggccgatggaaatttcgtacgggaagatgatcacccttcccaaaatgtcgcaaaacagcacaaaaacagcgcccagcagagcggtgtgaggcaggctgctcctcaggttgtcccctttgtaaatcgacaccatattgggaatgatcaaaccgagaaacggcagcatcccgacggtcaggatcaccagtgaagcgatgagcgacacgataatcagaccgatattaacgacgcgtttgtatttcaggccgagattgacggaaaagctctctcccattcccgccaccgtaaatttatccgcatacacataagcgatgatcaccagcgggatactcagatataaaagctcataccggcctttgacgaccagtgagaaatctccctgcagccaagacgacaggttttggatcaggtcatatttatatgcgataaacgtggcgattgagctgacgatgttcccaagcattaaaccgacgagaggaataaaaatcgcatcattgaacttgattctctcgaggattttcatgaaaaggaaatttcccgccaacgcgaaaacgaaagcgatagacattttcacaagcggactcgctgacgtaaaaagcattaatgaaatcaagattccgagccttgcccaatccatcgttcccgcagtcgtcggcgatacaaatttattccggctgatctgctgcatgattaatccgcagatgctcaggctcatgccggcgatgataatgctcaccaaacgcggcagccggctgtcaaacaatgtacccgcctgttctttatttaaatgaaaaatatccagcggcgacaaatcttctacaccgataaatatagaagtacacgccaaaaccgccagtagcaaaagtaagtaacgtagcttcatgctgcctccctgcacccatcacaaacggtatgactgattgccaaacaactcccatatatcccactcgtaatgattatcattatcaacgacaattataatcttatcatctttccaagcgcagtcaatacagttttgctttcaaaagcggtcatccgcgggccgtacactaaattgtcttacaatcagtctatcaagaatttgcaggattttctataacctacatttggctgcttatcattttttgcacatgataacacgcttgagggaaacaaatctgacaaacagcggcaaaattcctccactaaaatacaaatgttctctccacgtagaaaaaatccttgatttacatgtttgaaagagagataataaaaattaaatttgtgagaaaatttaaatattaggggatgtaaatcatgaaagttgtaaaattcggaggcagctctcttgcgtcaggagcccagcttgagaaagtgtttcaaatcgtgacggctgatcccgcgcggaaagccgtcgtcgtatcggcaccgggaaaacgcttctcggacgatacaaaggtgacggatctgttaatccgctgtgcggagcattatttgcaaaaaggtgcagcgcccgagcttgccgaaacggtcattgaacggtacgccgccatcgcgcgtgagctgaacctggatttctctattatagaaagaatccgcagtgacctattcgctcttttaaacagctgtaaaaccaatcccgaacaatatatggatgcggtgaaggcgagcggcgaggacaacaacgcgaagctgatcgcagcctacttccgacagcagggcgtgaaagcggaatacgtaagtccgaaagaagcggggctgtttgtgacgaatgaacccggaagcgcgcaggtgctccctgagtcttatgatcatttgtaccgtctgagaaaccgtgaaggcttgatcatttttccgggattcttcggttacacgaaggagcatgagattgtgacgttttccaggagcggttctgatattaccggctccattctcgccagcggcttaaaagccgacctgtacgaaaactttactgatgtggacgccgtctattccgtcaacccgtcaatcgtgcggcatccgaaagaaattaacgaactgacgtatcgggaaatgcgtgagctctcctatgccggattttccgtttttcatgatgaagcgctgattcccgcatttcgggccggcatccccgttcagattaagaatacgaataatccggatgcgaaaggaacacgcgtcgtcagcagccgtgacaatacgaacgggccagtcatcggcatcgcaagcgacacgggcttttgcagcatttacataagcaaatatttaatgaaccgggaaatcggtttcggccgcaaagcccttcacattttggaggaagaaggattgacgtatgaacacgttccatccggcattgacgacatcacgatcatccttcggcacaatcagatggactcagaactggaacacaggctcgtcacccgtctgaagcaggaacttcaagcagatgaagtcacagtcaggcacaatctggcgctgattatggtcgtcggggaagcgatgcgccataatgtcggcacaaccgccagggcatccaaagcactgtcggaagccggcgtcaacatcgagatgatcaatcaagggtcatcggaagtcagcatgatgttcggagtgaaagaagaacaggaaaaacacgcggtgcgggcactgtatgacgaatttttcgccggagtcttactctcataggacacagcctcttttttctcttgtccactaatatcccttacaaagcagcttcttttacatattgtatggtatagacaatatggaggtgaagctcatgtcaggatattctggaatcagctctttcgctttgatcgttgttttatttatcctgttggttattgtaggtactgcctatgttggcggtttctaagcatcactccgtctatatgaggacgctgcgggttttgacctgcggcgttttcttttgttttccgccgctgtccgagtccggccgcgcaaaaaaagactgccgggaacattcccaggcagtcttttcctttgttctggttattttctcctcacgtcattcctctttcagctacatggaattcagcctgatctgtctggcctgcacctgtcactgtaaaaatcgcggcggctgctaaacaaataacaaaccatttagatttcaatttcatacaaaccctcactcctttgtatttgtttccttgcctcttcgactttcagaaaatagtcagaagaaattttaaagcaattttgttcatagtaatatttagctgcttctagtgctaaatcctctatatcggcgtataaatttttatcttccaggtaacggaaacacgcgctgattgtctcctcatccggtttcgcctgatacagagcctgcagccattcgaattttaccgtgtaaacgggatcgtctgtttctttagcatattcatatccccgcttgtgatattccgacgctttttctttttttccgagtttaaagtaaatgagtgtgattagaaaatatgcttgaggaagagaattgacgattctttgtgattcaaatgtatcgaccgcccgttcaaagtacggaatcgcttcgccgatgcggtcctgattgtagtagcacagtccgaggttatacagcgccctcccgacaagctgcgctttttgttctttttcggccatttgcagagcgtgctgaaaatgtttggccgcctgttcaaagcgcctttcatccattaaattgacgccgaatacaaaatggcattgaatgatccggacgttatatgtgtcctgctctacgtaaatttcataagcgttttttatatgtatcaaagaaaaatacgtttgtttcatatgataataagcttcggccactttaaaataaaactccgcccgttccacgtggtccgatacgaaggccagttttttctcagcttgtttataatatgtaatcgctgagataaattctcttttatcaaattcaaacatgcctttgaaaaagttgacgtaataatcgagaagccctttgaggccggcctggctgttatcaatgttatcaagaatttccgacagggtcggctggtcttctatcttcagtttttccagcggctccaagtagtccagcatcagctgatggcgaaattccatgagggaataataaagcactaagttcgaatcaggctccatatggtcaagctcttgtttgatctcggccttcaagatctccgcatccggcacgctgaatgttctgatgtatcgataccactcgttaattttctgcccgactgctgaagaaggaattaacccgctcttcattccttcaccctccccatccaagacctgtttaccagttattttatcacgtttccgtctctttccatcccgaaaaacacgcaaactttgtttcggcagagcgcaattttccgagtggagttaaaacagacggcggccagacggaaccgccggtttcaagatgattcatgtttcgtattcagcggaaggcggattgtaaaggtcgtgccttttcctttttcgctgtcaatatctatcgtgcccttgtgcatttcgacgagctgcctgacgatggacaggccgagtccgtattcgccgtatgccgtattcgtccgggacacgtccgccttataaaaccgctcccatatatgctcaatttcctctttggagatgccgatcccggtgtcttcgatttcaatcaccgtttctttatagccttcatacccgcgcagcgtgatgtctcccttttgcgtaaattgaatgctgtttttcgtgatgttgacgagaatctggatcagcctgtcataatcggcgaacactttgacgccgtcctccacttgaatccgcagctgattttgtttttcctccgcctgctgattgagatgctctttaataatttcaaacacctcgatgagcggcagactgagcttgtccagtttgatttgctgggatctgattttttcataatccaggttttctttcacgagcctgagcatccgcttcgtttcttcgctgatcagcgagaagcatttctctttatctttttccgggatggtgttgctgttaagcccctccacaagtccgttaatggtcgtcaaaggcgttctcagctcatgggagacatcggcgataaattggcgcctccgtttttcaaggcggtcaatctgctctctcgattgcttcagatttttggccatgatgttgaaatcggacgccagcatgccgatttcatcgccgccgctgttcttgagcgaaatatcgtaatcaccggatgccacttttccggtcgcatcccgcaatgtctgaatccgcttgacgtgaaatttagataaaagccagctcagcagaatcgtgatgataagggtgctgatgatcgcgtaaaacatatagcggttgacctggctgatcatctgctcgacccctctgacgggagacacgagcagcaccgcgcctttaaattgatcgttgataaaaagcggctttgcgacaagcgatacttctaaaccttccgtattaaaacggttcatctccgctctgatctgaacggttttcccttgcttcagcatgtgccactctttacttttcagcttctcgcgcggcggcatatcgtcaggaaaaaagtaaggccgctgatgttcatcgaaaataataaacctggtctcgcgcgtttttaacatgtcctgatacggatacaggcggcgcagatcaagatcgcggccgttcagctcacttgtgatctgctgcgcgtaagaagacagctcgtccactttattttgatacgcaaaatctttcacaaagtgcgaaaacaaggaaatgatgatgaaaaaggccaaaatcaaaatgctgacatggcttaacagcagctgatataagtatttaatcctcatcaaatttgtatcctaccccccacaccgtgtataaaaacggtttttcctcactggacagttttttgcgcagccgtttaatatgaacatcaaccgtacgttcatcgccgtaaaattgatagccccacacctgctcaagcagctgctctctcgaaaaaacctggcgcgggttttgtgcgagataaaagagcagatcgaattccttcggcgtcagattctcgacaggttttccgtgcagaaacacttcccgcgtcttcttattgattgaaaaacacgccgtttcgatcaagtcgtcgctttttacggcctgccccgtcgcccggtatcttctgatcaccgctttaatccgcgctactagtgtcagcggactgaacggcttggtgacatagtcgtccgcccccatttcaaacccgatcacctgatcagactccgtgtcctttgcggtcagcataataatcggtacactgctcgtctctcttattttccggcagattgtcactccgtccatggatggaagcataatgtccagaatgaccaaatcccagtcctcttccgtgaaacgctgatagccttccactccgtcatggacaaattcggcttcaaatccttctttaaaaaagaacatttccgtcatggtgcatacgcttatattgtcttctatcattaatatcttcattggttcctccgcttatcttcacgctttttcttataatagcaccattttacccgggtgttttcgggtttcacaattgttagtttttatttcatcacccggaaatagtttattcatatttttttcatacatttctcctactatatacatatcaaatggccggtgctaaagaaggccggtttcacaagatctgacacccacacggaggaacagacatgaactttataaaaagagccttttggagcatgaaggcaaaaaagggaaaaacatttttgcagctggttgtgttttcagtgatttgcatttttgtcctgtccggtcttacgatccagtcagcggcaaagaaatcaagcgaactggcaaggcagcagctcggcgggagcgtcacactccaggctgaccgccaaaagcaaatggcgcagcagcaaaaagacggtgaaaagaggacgtttgaatcaacgccgatttccgtctcagatgccaagaagcttacatctttacagcatgttaaaaattacaacttcctcacgacagcgtcagcaaatgcagaaagctttgatgcgataaaaagctcaggcgaatcagccgataaccgttccggcgccggccgttttcaaggcggcggaagacagatgatttcagctgatatctcgatcgaaggcgtgctctctacggcattgcttgatgatttcacaggcgggagctcaaaaatcactgacggccgcgccatcataaaaacagatgcggacgcaaaagtcgccgtgattaatgaaacgctggcagatcaaaacaagctgaaggtcggcggctccattaccgtttcctcagcagcggatgattctgtgaaaacgaagcttaaaattgtgggaatctataaaacaacatcatcaggagacgatcaggcacagcatttttcattcttaaatcctgacaataaaatctatacgccttacactgccgcggcggcgttaaaagggtctgataacaaaaacaaaatcagctcagccgtttattatatggatgatgccaaatatattgactcattcgttgcggctgcgaaaaaaacatctatagatgataaaacctacgcgctgacgacaaatgatcaggtgtatcagcaaatggccggcccgattgaaaatgtcgcgtcattttctaaaaacgtggtataccttgtatccatcgcgggcgcggtcattctcgggttgatcgtgatgatgtcgatcagggaacgcaagtatgaaatgggtgtcttgatggcgatcggcgaaaagcgctggaagctcatcggacaattcttaacggaaattctggttgtcgccgttattgccatcgggatcgcatccgtcacgggcagccttgtggcgaatcagctcggaaatcagcttctttcccagcaggtcagctcagccgatgattcacagcagcaaacaagcggctggggcggaggagaaatgccgcggggaggcggcatgttcggtcagcattcatccggcgcggatgtcatcagtacaatgcaggtaaacgtctcgctgaatgaccttctgattcttggcgacatcggcgtcgcaattgccgtcatcgccacattactgccgtctgtatcagtcatgcggcttcaccctaaaacgatcctgaccaagcaggaataagaggaggcagcataatgagcctattaacctttcaacagaccggctactggtaccaagacaaatcacagccgctgtttcaggatataacgatcagctttgaaaaagggaagttttatacaattgtcggcgcctccggaacggggaaaacaacgtttttgtctctggcgggcggccttgacacacctaaagagggaagcatcctttataacggaaaagacatctccaaaatcggattaaccaaattcagaaatcaatatgtctctatcgtctttcaatcttatcatctgatcccgtatatgacggcgctccagaatgtcacaacggcgatggagatcaccggctctaaggagaacagcaaagatgcgttcgcgctcagcatgctgaaaaaagtcggcatcaccgaacagcaggcccgtcagcgggtgctgacattaagcggcggacagcagcagcgcgtttcaattgcgcgggctttcagctgtaacacggatttgatttgcgcggacgagccgacgggaaatctcgacgaggatacgtcaaaggaaatcgtccggctctttcaggatctggcgcataaagacggcaaatgcatcatcatggttacgcacgacgaacaaattgccaaagtttcggatatcaacatccgcttatcaagaggaagtttcacggttaaaggaaacggcacggccgtttcctgataccgcgcccctgccagcgcagacaggggcgcaccctatatcccccttttcaatagaagtgaacgtaaaaagagcgagggctgcatccccccgctctttttatttatatcagctgtaaataacggtccatatttgattgtccggctgctttgatcaattcttccgcctttttctcttctcccggcaaagcgagccggagtttgtcttcaatgtctttttcagaaagaccgtttcccggcgctcccttcggacagtcgatacgtgtttcatagacatgaccgccggtagccgtgacccgcacaattgtaaaacggcccttcggaacggcgttttcagccggctgaatttggtcatcgcaactgcggtgaatccgctcaaatcctttttgaagggattccggaatcggcgcggatgtgaaatgttcaactgaaaaatccttaccgtgcaaagctaaggtgatcacatattccacgctgaatctccccgcttcgcctgttttcggacgccgttctgtcaatgcggcgtcaccgcccggcggataaatcacgtcgatccgttccgtttggccgaaagtgagaccatgttcggccttcagcttgagaatggcgtccgccgcatgatgagccgccgagcaaaacggataaaccttaaaccaaagtcccgggctcacaatccgccaaggttttccccacccgcttacaaggagggtttctgcccgttcaagatcgccgtacagtccgaaaaaacctttctccccgtcgagcgcatgaactgagccgccgataccggcctttgcaagctgcacggcgaacaacccggcttgagcggccagtccggcgtggagcggcttcatttctgtcccgaattgcactctcatgcctccggagcgggcagccgcaaacccgattgctttctgcaattgggtttgattcagattctccgcgaatccgacggcgcatgcggccgcaatggcacctaacgttcctgtattgtgccagcctttctcgtaatgatgccttccagctgactcgccgagccgcgccatcacttcgattcccgtcacataagcaccgagaaaacggcttttgtctatacggccggctgatgcggctgcaatcaaagccgggaggatgactgcgctcggatgtcctcttacatcagaatgaacatcgtcaaaatcaagcgcatgtgcgatgaatccgttaatgagcgcggattgggacggcgtggttttttgatttctgccgataagcggcgctatcggcaccccgccttcttcttcggccagttttaccagcttttcaactcctttatcccgtctcccggcaaaagctgccgctgtaaaatcaagcagtcctttgcgcgcttctttcatcgcttcagcggatgtttccggcacagacgacatgacggcctgagcaagcccggccgtcagattttccgtattcattccgtctgctccaatacgttgacggcaagccgggcgaaaaactcagccgctgccgggagcgctttttcgtcgagtgtgaaggcgggatggtgccattcttccgttccgtttgttcccatccagacgaagaagccggggattttttcttgatataatgcgaagtcttccccgccgggcgactgttctgcccgaacggtttgaagcccgaggctttcagccgtttgttccgccgcctgtatgaaacgggcgtcgttcatcactgacggaaggtaaggataccagcggaaatcagcctctgccccgaatccggccgcgattccttcagcaacccgcttcatatgtttcggaacagcgtcacgcgcttctttttgaaacgtccggacggtgccttccatttcaacatggtccgggatgacattccaagagctgccgccctgaactcttgtgatgctgacgacggcattatgaagcgaactgatatttctgctgacaactgattgcaggccgccgatgatctgtcctgccgcctgaatcggatcaatgctgttatcagggattccggcgtggccgccttttcctttaacagtgatttcaaagcggtcgacactcgccatcagcggaccttctttcagaccgaccgtgccgacggggaggtcaggtttgttatgcatgccgaatatcgccgatacaccgtcaagcgcgccggcttcaatgacctgtcttgctccggcggcgatttcttccgcgggctgaaaaataaaccgcaccgttcctttcagctcatgctttctctcatttaataaaaaagccgtgccgaggatagatgccgtatggaaatcatggccgcaggcgtgcatcacgccgctgttgcgtgaagcaaacggaaggtttgttttctcttcgatcggcaatgcgtcgatgtccgctctgacggcgatgacggggccgcttttgtctcctttgatttcagcaatcactccggtttgaagtttcggcatatcaagaaccgtaattccttcttcctccagccagcggcggattttattcgtcgtttcgtattcctcgcctgacagctcagggtgttcatgaaggtcgcggcggatattgattaaacgtttgtttaatgattcatacgtttcatttgccatttcttcttcttcccttcttagacaagttcggcgggctctcccacttgcttaatgaattttttcgtccgttcgttctgcggattgtcaaacagctcttccggcgttccctgttcgatgatgcgtccgtccgccataaatatgaccttgtcggccacttcacgagcaaaagccatctcatgcgtgacgatgatcatggttgtctgtttttcggcaattgatttgatgacttggagcaccccggctacaagctcagggtcaagggccgaagtcggttcatccagtaaaatcgcgtgaggatcaacggccaaggcacgcgcaatcccgatccgctgctgctgcccgcctgacatcgtaatcgggtagctgtccgctttgtgttctaaaccgacttgccgcagcagatccataccgatctgttccgcttcttttttcggtttcttttgcgcggtgatcagcgcctctgtcacattttgcagggcggttttgtttttgaacaggttgtaattctgaaacaccatcgccgtctgctggcgaagcttatgaacgtctttgcgcgaataggacgctgcattcagctttgcatcaccgatttcaatgatgccggcatccgggcgctccagcagattcaaacaacggaggagcgttgattttcccgagcctgacgggccgatgatggccgtgacttcgccgcttttgatctcaagatcgatcccgtcaagtacggtaaggtctttaaatgcttttcgaatatgtctgacttgtatcatcctgagcctcctcctatgtgcgataaggcttgctgatcgcccgttcgagcagatcctgcagcacactgtaaataatcgtaagaatccagtacatgaccgcgacggctaaatacgtctcaaaatatttgaggttgcctgatgcgtacatttttccttgggcgaacatttccatcactcctaatgtaaaggcgagcgatgtttcttttaacaggccgataaacgtatttcccgtcgcgggaagcgcgtttctgacggcttgcgggaaaatgatccgtctgtacgcctgggattttgtcattccgacagacagacaggcttcaagctgcccctcatctactgagttgagcgccgcgcggaagatttcagccaagtaggcggcattcttcaggcttaacccgataatcgccgcagttaacgccgtcatcttgctcattccgggaaacagctgaggcaggccgtaataaattaagaaaagctggacgagcgtcggcacgccccggaaaaatgaaatatacacctttgacagctggtgaagcacaggaacacgattttttgtgataagcgctaatataaggccgccgatcacggcaaataccatggctgcgacggccattagtaatgtgatcggcaaggcttcgattaacgcgggaaaagctgaaaacataaatccccaatcaatgctgttcattctcgattttcaccgccgtttcttaatgctttgcttctgttgtgatatcttctttaaagtacttttcagacagctttttcagcgtgccgtcttttcgcaggtcttcaatggctttgtttacttttttgcggattttatcgtgagccgcatctttcgcaaacgggaaagcgactttttcatagacaatcgggtctcctgctaatttcagaggcagaccggtctttttgatctgggcgatcaggacgctgcggctgtttacataagcgtcaacccgtccgtaagccacgtctttcagcgtgccttcttgtgtttcatacgttttcatgttgatttttttatccgggtccttgctctcaaggtttttcgcgtggtttgagcccagaacggccgccactgtttttccttttagatcgttgactgatttgatgtctttgttatcgtttttgacgacgatttgagtgcccgcatacgaatacggttctgtgaagttatacgttttcttgcgttcgtccgtgacagcgacctggttagagatggtatcgagtttgccggtctggagctctcccatcagtccgctgaattcaagcagcttccagtccagtttcatgttgatttttttcgcgacggcttccatgacatccacgtcaaagccggtcagcttgccgttttctttatatgcgaacggatagctttgtcccgtggcgcctacatgcagtacgttatcgccgccttcgctttcttttccgtttccgcatgctgataagaccgccaaaagtgcggcagacagcagcaaagcccatgttttcttcttcattgaaatcccgccttttcctattaaaatgttaatcctgcaattgttttttcaaataaatggtgatgtgcccttttcctaagtccttttcgcctgcacggacgtagcctttccgctcgtacatgccgatcagccacggatgcttatccgctgtgcccagtgacacgaaaggcgcttttaatgtgtcgcggagcactgtattctccagccactccagcatgtctgagcccgtccctttttttccggtttcaggatcgacggcaaaccaccaaatatgaggaacaccgtacggcccgggattcggcccccacggcatccgcagagaaatcgtcgccagaatccggccgtcttcctccaaaacgtagcaggcgtttttttgtatgttattcaaaacgagttctttatccgccgtggcagcggcaaagttgatgccgagcttgcggatcggttcatacgcccgcagtgtcagtgaaagcagctcatcagcgtcttcctccgttgcgagccggtattgtcttgacatgatgagccctcctttagtcggcatatcggtttgccggtttttccagtccgaaatgttctctgagcgtcgttccttcatactcttttctgaacacgccccgttcttgtaaaatcggaatcactttgtctacaaaaagagtgagaccttcaggcaaaagcggcggcatgatgttgaaaccgtcacaagcttgttttccgacccattcttccatcttatcggcaagctgttccggcgttccgacaaagatatgatggcctcttgaacccgccacatatttgtacagctcgcggatggtcatgttatcgcgtttggccatctcctgaacgagcttgaagcggcttttaacggcattcgacgcatccgcatccaattcaggcagcgggccgtcaagcgggcaggcggaaagatcgacgccgcccagatagttttgcagaatgttcaggccgacagacggaatgatgaggtcttggagctcttcatattttgcctgcgcttcttcttcggtatcggcgataacgggaaaaattcccggcatgatcgcgattttttcaggatcacggccgaaagaagccgcttgttctttaatagattgatagaattcctgcgcggattccaaatgattttgcgcggtgaaaatgacctccgccgttttggcggccagcgcttttccgtctcctgatgatccggcctgaataatgaccgggcgcccttgaggtgtgcgggcgacatttaacggccctctcacggagaaatatgttcctttatggttcaattcatgcattttgtctttatcgaaaaatgctcctgattctttgtcacggataaaggcgtcttcctcccacgaatcccataatcctttgacgacttcaacgaattcttccgcgcgctgatatctgagatggtgctcaagatgcttttcgccgctgaaattaagtgcggtcgattcaatcgaagatgtaacgacattccagcccgcgcggccgttggaaagatggtcaagcgatgcaaattgtctcgcgatatggaacggttcgctgtatgtggtagacgcggtcgccgtcagaccgatgcgggatgtgacctgagcgagcgccgacagcagcgtaaacggctcaaagcgcgtcagcacattcggatgtgatttgccgtcaattgataaactgtccgccaagaacagcatgtccaatttcccccgctccgctgttttcgccagttctttgaaataatccaaattcatgctcgcgtccgccggtgcctgaggatgtctccaagaagcgacatgatggccggtgcccgcgagaaacacaccgagtttgatttcttttttctttgtcatgatggatctccttctattctgaaatacggttcggaacatattaacaccactaaacctatatttcctagtaattttataagaataaatcaaaatgtacaattgtcaggtaagtttgtcaatgcatgaagacaaaaatcatgattttttaaaaaacccggcgcaccggccgggttatttcttcgaaactgtatagacggtccctttgacctttttcttaataacggcaatgataagcagcaaaacggggaacagcacttgaaacggaagatgaatatagatcggcacaatgtttaagccttcattcatgtgttccgaaaaattgcttgcgatgctgatggagagaatcagcacccccaatccgaccgggaaggccagctgggacggatttttttctttaaacagcgtggacacgcccacgacaaccgcatatgtaaaaaggctgactttgaaaaaaccgccgatgacgagcacgagcatgaaaaagacatccagccggtctaaaaactcttccactttaattgtctgtatggtgctcagcagcggaaattgagagcggagcattaagttgacgtccagcacacaaatattaatcgccactgacattgccaaaaacagcccgctgatgataatcgccagaaatccggttttcttcacctttttccgatcttttaaataagggaaaatcatgacaaacacgattaattcaccgaacgggatgaacatcgtctgtttaaacacggaataaatgaccgttcctgcaccctccgctaaaacgggctggagaaatctgaggtttatcgtgcctgagctgataatgaggatcagcccgacggctgtcaggaaatacataatgccaaacagcagctcgccggctctcgctatcacttcaattccctttctgaccgcaaatatcgcggcgatcatcagcatggcattcacaattaaaatcggcgtgtcctggtaggcgaaggtgacaagcatttcgccgaaatcccgcaatacgcgggcggcgatataagcaaaatagagaatataaagaagggagaccgcccagctcagatgtctgccgatcagttcgttcatgtaatctctcggtgaagactcaggaaaaaattgatacagcgcctgataaacgtagaaaagtccgagaccgataacgcacccgagaagcacggacagccacgcatcccgcccggccatcgtgcccggcgggatcaataacgaactgcccaattcaaacaaaatgatcataataaacagctgacgcgtgccgattttcgcattttccatacgcttcgctcctttctcctcaaatcaatcatgctcaagcttgtctgagagaggattattccgcaagcccgttcttctgataatgacttccgttttgacatctacggggagattggggaaatattcttcatcccacttccctttgaactttttccatttgtccggatgcttccgatagatcaggtctccgaagccgacgaagtcattcttatgggcttttatatcttcaatcgatttggtgatatctttctcaagctgcacgctgagcgccttttgcatcgtcatcagcacttgcggatcagacagatggaaagggtatctgacagcgtccaccagcccctcgacctgagcatgcacgtgaatatgcggttttccgttcggaaaagtggccgtcacttttgtattctggcgggtgacctgcagactgattgcatgcttcacgttcttccaatccgcattgatgaacgtatgcttgatcctattgagcagccatacagcccccacactgtcgtcatcctcaatccagtaatccagcctcccatcctttttgaacaccgccagtccgtccgctgacagcactgctttcggttcagttgtctgcgtattttccatcgtaggaccggctttatcgtctccgtgcatttcataacccggaataaacggcgacccggccggagaagcgagatcaatcagaacgtcctgaaggctggttttaatgactctgccgtattgttcctgcgtgaagctgagcgtcttgttcactttattggaagggattttatcaatcggcgtcagcactttaataatgtcttcagccttgcaattatgcgcgatcacaacagttgcggtcgtcctgaattcggtgtcgcggtcaagattgtccagaataaaactgagcccttcctctttcgccagtttttcactgaacaccacgagattcgtatgcgcaaaatagagccttctggacactttcatcgagccttttctcaaagcttccgtcatattgtctccggacaccgaatagacggaaaccggaggccggtctcccgctccgccgccctgcagaccgccggccacgtttcccggattgataatttgcaagtgaaggacgtattttcccgtttcggtccggtcaataccgatggcggagatcaccgctagatcggtcagctcccttttatcccagcatccggatacaaacataagggaaaccatcgtacaaaggataagcatccatttacgtcttttcattaccgtcgccctcttctacatctttattaaccattcctctggatgtctccggtttcggtctttgatgttccccttggcgcctgttgttttcctgcacgagcagtcccggccttttttcatccgcccataacggagctcggagaagggaatccttcagcccgcccggggttaaaggagcgagcggggacatatacggaaatccgaatgaacgcaggccgcacagatggacaaacatcatgataatgcccagaatcagcccgtaaaatcccatgaccgccgccgacagaataaagagaaaccggatcaggcgcgcagatatcgccatgtcaaaagccggggtcgcaaagctggcaatcgccgtcagggcgacgacgataaccatggccggggagacgatgccggcctgtacggcggcctggccgatgacaagcgctccgactatggaaacggcggagccgacaactctcggaagccggacacccgcctccctgagaatctcaaaggccacttccatcgtcagcgcttcaatcacggccgggaacggcaccgtctcccgctgagccgcgatgacaatcagcagctgcgtcggaatcatttcctggtgaaaggtcgtcgccgccacataaatccccggcgccaccagtgaaatgaagaagatcaaaacccgcagcaccctgatgctggtggcgatatcaaatcgtgaataataatcctcaacggattgaaaaaattgaataaataaggccggcgcgatgagaacgaacggcgttccgtccacgataatcgcaaatcgtccttccagcagattccccgccacgacgtccggccgctccgtatgatatacggtgggaaacacagaaaacggcgcgtcttcaatgagctgttcaatgtagccggattccagaatgctgtcgatgtcaatgtgcttcagccgcttgcggacttccttaatcagctttttatcgcaaattccgttaatatacatcagcgcgacatccgtattcgtttcgtgtccgatctccattttttcaacccatacatcaggcgtttttacatacctgcggatcatggatatattggtttgcagagattcagtgaatccctgccgcgggccgcggaaagagacctgagtgctcggttcttgaatggaccggtgctctcccccttccgtgctggcgatcagcgccttgtcagccccgtcgacaaaaatgagcgtgctgcccgccaccagcccggcataaagacttttccatttttcttcctctttcaccccgccgatcgcaagcgttttatcgtatatcaggcagaccgcttgttccggctgaacggacgggatgtcgattaaatcctccagaagggattggctgacgagctgttcgtctaccaaaccggcgatatacacaattgcagccggaagctcttcttttccgattttcagccggcggatgacgacatcggcactgttgccgaacctctcagacagcttcttcatattttgctttaagctgagggagatcggctcatcccgctctttgtccggctggctgtccgcttcttttctgtcttcattgtcacggtcgttttgatcggcttttttttgtttcttctgtttaaaaaatggcggcatatcgcaaaaaacctttcctcgtttttttcatattcttcctgtacggcaaaagattatgcacggcggaaagtctgtataagttctgcggaatcgaaaaggataaaaagggagagtgatgcgcatgaaaatattgggggtttcattttttttgctggctgcctgtctgatcatttcagtaacgatagatatgctgcaaggtttcagtttctatggagcggtccaaaacaacctgtccgcttttaaattgaccaccttctcagaatggctgatgctgtttttattcgccctctttttaatcagagaaatgatcgttttatataaatcaggtaaaaaagatgcctgacaggcgcacggctgtattgtgtcaaaaaagaacacatccctccctctttcggagttcatgtgttctttttatttttccggcgggaccgttttcagatgacgatatttccgctgtccgtatctgtcgcgtgtttcacaattgcgcctttgataatgcggttgccgatgattttagtacttgcggaggaattggtttggatggcggaagcagaagcggcggaaaggttgttgatggtattgcccgacacgagggaattggaggctccgttcagatagatgccgatcgggctgcccgccgttcggttgatcgtgagcgtattgtctatgacttcatgcgtgcctgaattcagatacacggtaacgatgagcggtgatgattcaaaacggttgctgatgacagaggttcccgaggatgttgaactgaaaatgggatagtttttgtagcttttgaagagatttcccttgatgacagccctggcgtcatttgtcacagatacggcataggactccgcggcgccctgatacgcattcggaatcagcgtatttccttcaataacggcatttccgcctgttacccatatgccccggctgaacgatttcagcacattttgttttacggtgatattgccggccgacatgctgattccgtccgttacctgattcagagtattattcataaagacggcgttttccgacagcgtcgcccgcatccccgtgcttcgtctcgtttcggaacgtccgttttcaatgacattgccgtcaacggtcacatcttccgcttgatagacggaaatgcccgtattttcaaattgactgattttgttatgggtgacgaggacgctttttccccttacatctattccggtggaaaaaccggtaatcagattgttggaaatgacggcattgctgctgtcctgcccctgtgacacaccttgtccggcgactgcggttcttgagccgccatctgaccgaaagaagacattccccgaaatgacggtatgtgccccatacccgtagctgattgtgttatcggaatgatttccttcaattaacacatgatatccgttaaaattggtgactgagcttgctgcgtttccggaaaagaagttgttgcgtaccgtaatatgaagagcttcttcataatcaatatcgccttctccgtacgattcaatatcgattccgaatttcggagccgttccgttcccttgcccggcgtcttcaatcacgcattcttccaccgtaacggtattgcagccggtgattgaaatgttgtttcgccttgactgcctgatctcacagcggcggatggtcacctgttctgaagtttcgtaatcactgtttgtttttaacccgagcgggctgacaataatgccgtctcccgtaaaatccgaaatcttcacattttcgatcagcacattgctgctgccttcaatacagattccaaacccccattcatgggtcgaacgcaaagggacattggtatacgtgtgttcatcccgttcgccgatgatccggccgccggtgatggtgacattttcccgcctgcctatatagaaagccgagtagccccaagagctgttcggcgccactttaatcgtgcattccggatctaaaacgatggtgagatggctcggcacgttaatcccggcgttccgaaacggctggctgctgtccccgccaagcgtgccgttgattttatacgttcccggcggaaaaaacaccgtatgacagccttcgctgacggccttggccaagcattggttgatggcgcccgttacatcggtttttccgtctgccgccacaccgcaatccgtaatatccaatatacgattcggcaagtgataatctcctccttcctctcttattgtcatcttattccgccatatcccgctccgcctgtacatactttaaattttattaaaaaagtttataaagatagtttagtcagataatataacaaaataagtcattggaattaggaaaattcgtctatattcaacgttttaatatcttttcattctggaattttttgaattcagtataaattatattgacacaagtattatataagaatatgatttttgtaatacacttttttaagaaagggttggctcaggtggcatctattgataaggactctataacagaaactgtgccgcaacgaggctttttcggtcatccccgcggcttgttcacactgtttttcaccgaattttgggagcgtttctcctactatggtatgagagccatattgctttactatttatacacggaagtcgctcatggcggtctcggctttgataaaacgaccgcagttgccatcatgtccatatacgggtctctcgtatacatgtcgagcgtcatcggcggatggctggccgaccgggtattcggcacggcaaacaccgtattttacggcggaattttaattatgttcgggcacatcgctcttgccttccctggcagcacggcggcgttttttaccagcatggctctgatcattatcggaaccggcctgcttaaaccaaacgtatccagcgttgtcggagatttatatacgaaggaagacgagcgccgcgactcaggtttcagcatcttttacatggggatcaacctcggcggattgcttgcgccgctaattgtcggaacactcggacagaagtacaactaccacttaggcttcggatgcgccgcggccggtatgttcctcggactgattgttttcgctcttacgagaaagaaatacctcggcaaagcaggctccaatgtaccgaatccgatttctaaatcatcagtgatcggcacgggaatcggagtggtcatcgcagcagccgttatcatcgttctgattcaaaccggctggctgacgatccagcgtgtgattgatacggtcagtatcctcggtattgtcattccggttatttactttatcgtgatgttcacgagcaaaaaagcgacgaaaacggaaaaatcaaggcttgcggcttatgttccgctgtttgttgcagcggcaatgttctgggcgattcaggagcagggcgcgacgattcttgctttatatgcggatcagcgcacgagactttcctttgcgggcatgcatcttgagtcttcatggttccagtctctgaacccattattcatcgttattttcgcgccggtgttcgcctggatctggatgaagctcggcaaacgcctgccttcaacaccgattaaattcgcgatcggcattatccttgccggattatcatttttagtcatggtgcttccggttatgggcgggagcggcgagcttgtgagcccgctttggcttgtgctcagcttccttttggttgtgcttggtgagctttgcctttcaccggtcggtttatccgtcacaacgaaacttgcgcctgccgctttctcagcgcagacgatgagcatgtggtttttaacaaacgcctgcggtcaagccctgaacgcaaaagtagtcggtttgtttgataagatttctgaagcggcctacttcggctcaatcggtcttgtttcaatcattctcggtattattttgattcttctgtctcccgttattaaacgggcgatgaaaggcgtacaataacagataaagaaaagcctgcggaatcgtccgcaggcttttttgatgcgtctatcgttttaactcctcaagcgtttctctccatctcttcaagacatcttccggttcgtggagctggatggccggtccggatgtcagatccgcgtatttcgcccgatcttccttgacggtgatcacccggcagctgaaccgttcccgctcgtgtttcgcctctttcagcggcggaagcgcctcacattccaatgtgacgtaatatgcggctcctccgtgccaggcgatgaaaagagcttgtcccgaatgcagaaggcttcttacggtcgtcgtgtttttccataaggcaagccggagatttgttctgctcacggccacgatttcaccggcgctgatcatggccgcgtgcggacggccttcttttgtcacggattggagtacaaatgcgtcgtgctgctttttttcaagctccgtcccgtctaaaagcgtgtaaagcgcctccggcaagtgctccgtcagcattacgcttttctttccggaacagcgggaacatgtgcggccgtctccgtttctttcggatcgattttaaatgccgggttgaatgccgccggattcgtgatgctttccggttcacaggatctccatgtgaaaaagcaggtttggcattggtaaatttcccaggcacctttgaccggcgattggctgacggtttctccttttttcgattcacagcgcgggcatgttttcattgcaacctcatcctttcttattgattcattaagtccatcagtttttgttcccattctttcgttgtcagcggagaatcaagcggctgcgaataatggcctcttgtttccggcgcgacaggcgtcgtggcgtcaagaatcattttgtgtgtcatccctgccggatcagaccccgggtcaagcggaaggacagacaggtcaggaatgatgactgcatcgtgtttcggatgcattttcgttgagagcgcccacatgacttgcggcaggttaaacggatcgacatcctcatccacgacaatgaccattttgcagtagccgagtccgtgcggcgtggtcagggcgcgcatgccgaccgccttggcaaatccgccgtagcgcgttttcgttgaaatgatggcgatcaggccgtgcgtatacatcgcgttcacggcgacaatctcgttcggataagcttccttgagctgctggtaaagcggcacgcacgtattaatgccgatcatataatcgcactccgtccacggcatgcctaagtataaatgttcaaaaatcggattgtttctatgatatacccgtttgattttgatcaccggcatgctgcggccgcctgaataatggcccgtgaactcaccgaaaggtccttcgtattcccgttctcccgcaaggatctctccttccagaacgacttcagcgccccaagggatgtctaaatcagacaatttagatttgacgattctgtagggctccccttgaatcgcgccggccatttcatactcggattgatcgtataacagcggagttgacgcagctgtcgtaatcaccggctcacagcccagcgcgatcgtaacgggaagattcacgccgcgttcttcagcttggcgaagatgaatcgcaatatcatgctgaggcacgggctgaatgccgaggcggtcttttccctttacctgcattctgtaaatgccgacattctgcttgccgaaattgtccggatcttcaagatcgcgggaaatgacacacgctttatccaaatagtagccgccgtccccctggttgattctgaatagcggaaggatgtcaaatagattgatatcttccgttatttcattttcatgaaacggcgcggtttcttcccgtttgaccggcatcggaaatgcatcgtaccgtttggcaaactcaaagaattgttcctttacaggcgtatctttcggcatgccgagcatcatcgcgtgattcggccacgagccgatgacattcagagccacctgcgcatggtgatgtccgtaaatattgttaaacaaaagcgcaggggttttatccccgagattgctggctgcacgcgcagcggcacccagatccggctccggtttaacctcttcgttgactgttaagagctgcccttctttttcaagagcggcgagaaattccctaaaatcctgataggccattatcagattcctcctttttgtttttcaattccgtaccaccgtttcgcttccggcagacggatgccgaactgatcgagcgtccggaacacaatatggtcgatcaattcatccatgtcagccggcttgttataaaatgcaggcatcggcggaagaatgacggaacccatttttgtaagcgctagcatattttctaaatggatttggctgagcggcgtttctcttgtcagcagcacaagttttttccgctccttcaggatgacgtcagccgcccttgtcagcagattgtcagccattccggtgcggatgcttgccagtgatttcatgctgcacggagcgatgatcatcccgtccgtttcaaacgaaccgcttgaaatcgccgctgcctggtctttgtgagaatacgtataggatgcgagtttctcgacatcttttaacgtataatcggtttcatgtgtaatggtgacatttgcccaaggagacacgacaagatgggtttcgatctccgcggcttttaaatattctaaaagcctgatcccgaatatggctcccgttgccccggtcattccgatgacgagcttcatatcgacccctcctttacgcttgaaatgtggtgtcaaaaccatcatactcctgatatatccatatgaaaaatattcgttaaatctatgtatcataccttaaaggtataacagaaaggggcgcgttctcatggatatccggcaattgcgttatttcatcaccattgcccaagagcagaaaatcacgacggccgccaaaaagcttcatatggcacagccgcctttaagcagacagctgaaacagctcgaagaagaattgggcgtcattctgtttgaccgcaataaaaagaaacacatgacccttacatatgaaggaaatgtctttttgaaaagagcgaaagagattcttcataagtttgaggacgctataatcgaggtacaagagctgaaggaggaggtggccgggacacttgccgtcgggtcaaccatttactgcgccgcgctcatgcttgagaaagtgtcacagatgaaagagcggtttccgcatctcacctttaacatttgggaagatgagcctgtctcactgctcgagcttctggaaacccggcagattgacgccgccgtcaccaccaccttgattaaaaacgacggcattgaatcgaaggagcttgaagacattccgtgtgtattggtgctgtccgagcattcaaaacgactgtgcggtgaaacgattaaactgaatgacatcgcctctttgcctttgatccttttgcgcaccgtcaatggaagaggtgtgtatgaccaagtcctccaagtttgtgaacagtacggtctcgaccttcaggttgtctgtgaatgccatgactccgcgacgctcttgagcctcgtatcatcagggttcggcgccacaattctgcctttgacgatgattcccgtccatatgcgctcgcatgtcaaaacggttatcatcgaagacaacccgtttgtcatgacaccggccgtcatctggaggaaagacagctatctgccgaagccggtcagacagtttttggaattattttgatccggaccacgaagaattcccgcttatgaaaaccaattacttgactcatactaaaaaaaagttatcctttacaattgggagctattttttctcaataaaactactcagaaaagtggggaataaagaagatgaaaaaagcattattcgctttgttcatgatggtcagcatcgcaatgcttgcagcctgcggaaactcacaggatagcggatctaagtcaaaagacggcgatctttgggcttctgtcaagaaaaaaggcgtactgaccgtcggcacagaaggaacgtacgaaccgtttaccttccatgataaaaagagtgacaaactgaccggatatgatgttgaagtgattcaagaagtcgcgaaacgcctcgatctgaaagctgacttcaaagaaacgcaatgggacagcatgtttgccggattaaacgcgaaacggtttgacgtcgtcgccaaccaagtcggcaaaacaggccgtgagaaccaatatgatttttcggataaatacacaacgtcaaatgcagtcgtcgtgacgaaaaaagacagcacgattgcgaaagaggctgatgtcaaaggaaaaacagcggctcagtcattaacaagcaattacaataaattagcgaaagaagccggcgcgaaaattgaaggcgttgaaggcatggcgcaatcccttcagctcattcagcagggccgcgctgatctgacttacaatgataagcttgccgtactgaactacttaaaaacgtccggcaataaaaacgtgaaaatcgcgtttgaagcaggccagccgcagcagacgtatttcgcattccgaaaaggaagcggcgaacttgtgactcacgtcaacaaggcgttaaaagaaatgaaagaggacgggactctttctaaaatagcgaaaaaatggttcggcgaagatgtttctaagtaacatgccggaacccgtgattgcaacagccattccttgggatttggtgcagcagtcattctggccgattctttccaggggaatctattattcgattccccttgccattctttcctttattttcggaatgatcatcgcgctgattacggcgctcgccagaatgtcaaatatgaaaccattgagatgggtgttcagcgtatacgtatcagcggtgcgcggcactcctcttctcgttcaattgttcatcattttttatctgttcccgacatttaatattacgctggaccctttcccaagcgcagtcatcgcgttttcattaaacgtgggcgcctacgcttctgaaatcatccgggcatctatttcatccgtgccgaaagggcaatgggaagccggttatacgatcggcatgacctatcgcaagacattgttccgcgtgatcctgccgcaggcgtttcgcgtgtccattccgccattatcaaatacatttatcagcctgatcaaggatacatctctcgcgtcacagattctcgtcgcggagctgttcagaaaagcgcaggaaatcggcgcgcaaaaccttgatcaaatcttggtcatctatattgaagccgcctttatttattggatcatctgcttcttgctgtcaatcgtacagcacgtgatcgaacggcgtctcgaccgttatgtggccaaataaggaggtttcgatatgctttccgtcaaaggattaaataaatcattcggacagaatgaaattttaaaaaagatagatatggagatagaaaaagggaaagtcatcgccgttctggggccgtccggttcaggaaaaacgacgcttctgcgctgtctgaacgcgcttgagatccccaatcgcggcgagctggcattctccgatttttcaatagatttctcaaaaaaagtgaagcaggctgatattcttcgcctccgccgcaaatcaggcatggtctttcaggcgtatcatctgtttcctcaccgcacggcgcttgaaaacgtcatggaaggacccattcaagtgcaaaagcgcgacaaggagcaagtcagaaaagaagcgatggagcttctggaaaaagtcggactgaaagacaaaatggatttatatccgttccagctttccggcggtcagcagcagcgtgtcggcatcgcccgcgcgcttgcgattcagcccgagctgatgctgtttgacgaaccgacgtcagcgcttgatccggagctggtcggcgaggtgctcaaagtgattaaggatttggcgaacgagggctggacgatggtcgtcgtcacccatgaaatcaaattcgcgcaagaagtggccgatgaagtcatcttcattgacggcggcgtcattgtggaacaaggaccgccggagcaaattttctccgcgccgaaagaagaacgcacgcagcggtttttaaatcgtatactgaatcctttgtaggagcgggagaagaagcgaaacactgatttcgcttcttcttttttttggcggttatgctacaatgacaattaatgagattttatgaaagaagggacctctttgaagcgggaattcttgatgcgctggacgttttattttgccggtctgttaattttgtctttcggggtatcgttaaccattaaaggaaaagctctcggcatcagcccttgggatgcctttcattatgggctttttcagcatttcgggctttctgtcggccaatggtccatcgtagtcggcgcggtcatcgtggctttaacctgcctgttcacaaggacactcccgaaaatcggcgctatcttaaacatggtgctgatgggaatgtttattgatttcttttcgtttctgcttcctgagacgcacgctttttccttagcggccgtgtgtttttctatcggattgctgctgatcggctgcggcgtcggtatttacgtatcagcagggctcggcgcgggcccccgggactctctgatgatgctgatatctgaaaaaacaggctggaacgtgcaatgggtgcggaacggcattgagctgacgattcttgccgcagcctggatgatgggcggaccgatcggcgccggaaccattattacggctgttttgacggggctgattctgcgtttttccttgccgcagtcctctaaactgttaacatacgcgatctccgggcgggcaacgtccgttcattaaaaacaaagccgaaacggttttgtttttttattttcggacagctttcgtctgatatgataggatggttttgacaatattttcagacggaggatctggacatgaagatttacggagtatatatggaccgcccgctttctgcaggggaagaggatcggatgatggcggccgtgtccgccgaaaagcgggaaaaatgccggcgcttttaccataaggaggatgctcaccgcaccttgatcggcgacatgctgatccgcaccgctgcggcgaaggcttacggacttgatccggccgggatttcattcggcgtccaggaatacggaaagccgtacatccccgcgcttccggacatgcactttaacatttcccactccgggcgctggatcgtgtgcgccgttgattcaaaaccgatcggcattgatattgaaaaaatgaagcccggcacgattgatatcgccaaacggtttttttcgccgacggaatacagtgatctgcaagcgaaacaccccgatcagcagaccgattatttttaccatctgtggtcgatgaaagaaagctttatcaagcaggccggaaaagggctttccctgccgcttgattcattcagcgtccgccttaaagacgacggccatgtgtccattgagctcccggacggacatgaaccttgtttcatccgcacatatgatgcggacgaggagtataagctggccgtttgtgcggcgcatcccgatttttgtgacgggattgagatgaaaacgtatgaaaagctgctgtaagcatagaaaaaggagggtgtccccctccttttttgtcagcctgatatttccgcctgtttctgcagctgctttgcttcctgataaatttcttcgaacagatccgcgatgtgttcctcttcaacacatgaaaatgcgattcgcaaatcggtttcattaatggatatcgtcccgattcctctcttttcaagcaacgacactctcaattcgccggcgtttatgtctttcagccggacacacatgaaataaccagagttaaacgggtaaggcgtccatacgtcatcatagtgcttgttttctgcaagaacggctttcactttgtcggcccgttttttcatgatgttatatttcagcgatttttctttctcgtattccggtgactgcatcgcccgcagcataaacgtttgggacgggtgcggggcgcttgaaatcgttcccctgataatcccttttgttttttcctcgagcacgcgcagcgctttttcgctttttgtgctgtacgtaataaaaccgacgcggaagccccacgcgtaattttccttcgtcgcgccgtctattttcacgcaaagcacccggtcgtgcacttgggcgagtttgctgaagatggattcctgaatggacgtttcatcgtaaaacagattgtaatacgcatcgtctacgagtacgacaatctctttgccggcttctgccgcctccaggatcacgctgacgatttctgccgcttcctcttcccccggcgtgtagcctgtcggattattcgggaaattcagcacgacaatcgccttttcttcctgctttttcagcagctcggacagccccgccgcattaaaacgcccatcctgctgaaaaagcgggtacgtctcaatggatgccttgcgccggacaccgaaaatgaaattgtaatttccccaatatttatcaggcagaagcagtgtatccccttcattgacgaacaagtcggcggcgatgctcagcccgtgtgttaaagcgtttgtcacgatcggcgtgctgatgtctttgccggctaatgaaggattttcgagacgcatttttttcagccattcctgtctgagcggctcttttccctgcggcggagcataatcgtagatatcatcggggttataggcggacagtgtctcttgaatatgggaaaagtgcatcgactcgccctgtgaggtggcgattccgatcgtggcattatactttccggccttggctttcgcttccgccgattgtgtcagcacccctttcggataaaacaactctctgcccaaatcagaaagcatatgaagcacgtgcgggttttcttcagataatgttctgttcagctcttttgctgcatcattcatgtacgacaatcccttcaaaattatattccatcaaatcataacataaaatttttgataaatgagaaaactcacgggcagattttgttacaaaaaacagacagcgaatgctgtctgtcatatcctataacaattggcctgcagtgctcctgttaataatctcatagattcgttccgccactttttcagtttcacttaatatgaacatgtggccgtccgaaaactcatgaaatacgggattgtcggcccattttttccatccgtccgcatctttgatacattttttatctttccgcccgttaaaaatatggacgggtgattgaatcatgtgagaatcagacggacggaagctttcaagcgcgcggtagtcggatctgaaagaaggcaggaaaaatgacatgacctccttattctccactaactcctgcggcattccgccaagctcgataatatgggcgagaaatttttcatcatcaagatgagacacttttttcctttcaacatgcggcggctgaatggctgagatgatcacggcctgcgggtaaatgccctcccgctccagcttttgcgccagcctgaaagcgaccatgcctcccatactgtggccgaacagcacaaacgggcggtcaggatggagattcaactcctgcttgtataaactgacaagctgttcaaaatcctcaacgggggacatttgatttgttccgtgtcccggcggttccgcggcaagcatctcacactcaccttgaagataggtgtggagcgggcggaatgatgcggaatagcctcctgcgaacggaaaacagataagctgcgttttttccgtggtatcgaacgatttaaagagctggaccattggcgggcttcctccttttctatcgtgaagctgtcagcttcggatgttccttccttaggaattcgagcaaatatgccgcattcctttcgagacattctccctgaagcatttctgcatgactgccgcagccttttttcacacggtattcacctgtcgtggcttcctcccacgaagcgagccacggcggcatcgcaaagtccggttctgacgttaatagatctatatccgcattgaccgtgccggtgctgacggtatgcacgaaataagaataaaacgcgtttgtttttttggcgagaccttctttgacggcttcgtcattcagcgcttcgttatcccggtttaccttcatcagcgcctggacatcgctttctacggtgcggccttccaagtcgctgacgccttgttttttataagaatcaaccatgatcagccgctccactttacgtccttcggcttcaagccgtttggccgtttcaaaggcgagcgtgcagcctgccgagtatccgaacagcttgaccggtccttccggctggagctgattgatcagctctgtgtagcgttcaatgcgattgtcttcctcgataaaatcaaacgcacagattcgaaagccggacagctgttttgccagcggctggtacatcagcccgtaaccgagaaccggcgggaacgcaaacagtgtgtcagactgatttttattcatgatggtgagatctttcattcctttttcttcaccgtgaagcagataaccggcaatgtctgcgattgtcgtcgcttcgaataacagctgcaccggaatgtcagtaccgagctcttttttaatgcgcgacgctgccgtcatcgcttttaaggagtggcctccgagcgcgaagaaatcatcatgaatcccgatctgctgtctgccgagaatctcggaccagatgtgtgcaatcgtttcttccgtcgcgtttcgaggcccgatccattctttcgctgcctgagcctgatccggtttcggcagctgccgtttattgaccttcccgtttgtcgttaacggaagctcctctaagaaagtaaaggtttgcggcaccatgtaagcaggaagctgttttttcaggtgcctctttacgtcttcagctgaaagcggcgtccggttcacgaggtaggcgttgattgatgcatctccagactcatggcggtccgcaacaacgaccgcatctttcacacccgggtattcctgcagctgcttttcaatttcttcaagctcaatccggtgtccgcgtattttgacctggtcgtcaatacgcccagcgtattcaattgttccatccggcagccagcgtgctaaatcccctgtgcggtaaagcgtttctcccggcttgaacggatttgggataaacgtttgcttcgtcaggtcatgacggttcagatatccttttgatacacccattccgctgatgcacagttcaccaacagctccgaacggctgaagctgattttgcccgttaagaatataaacactggcattgctgatcggctttccaatcggcaatgaggaaatggaatccggtatgtcgtgcacgacgtgagctgtcgcaaacaccgttccctcagtcggcccgtagcaattaatcagcttgccgggccccatgatctcaagcgcctttctgacgtgaggcactgacgcgcgctcacccccgaataacacacagcgaagccccttcagccactcctctcccgcatcggtgagaagattaaaaagtgcggttgtcgcaaacatgacattgacattctcctgccggatcagatcagtgagccgttctgtatcaagcagtgtatgttcatctgcgataatgagccgtgccgcattcagtattgatgagtagaaatcaaaggtaaatgcgtcaaaggcgtaattggaaacagataagaacgtatcttgttcagaaaatgccatgtagtctacatgcttgaccaatccttgaatattggcatgagtggtgatattgccctttggctttccggttgtgccggacgtatacataatatacgccggatcatcgggatcaattgcggctgcaggatcgcttgcctgttcctcaaaccgtgcccgatcatcgatgatgagtgttgttcctgtatacggcagctgagccgctttttctttcatctcctgatgtgtcagcagacaggctgccgcactgtcagccagcatgtacgagattcggtcctccggcagcttcggatcaaccggcagataagccgctcccgcttttaatacgccgagaatgccgatcaccagctcaagcgagcgcttcgtgtataacgcgacaacggtgtccttacccgcgccttgcttttgcaaacggcgcgcaagacggttcgcttcctcatctaattcacgataggaaagagtctggccggaatacgtaagcgccggtgcatctggatttacattcaccgcttccttgaaccaatctgtcagaggcttcgcctgatgagtctgagccggcgggtttaagccggtaagcagaagctctctttccttttcatcaacaagtctgatcgtattgacaggctgatccggcttctggatgagctgctgaatcgctgtgagaagctgagattttaagcgcaggataaacgcctcatcaaacacattcccgttataggcaagcttaatcagcatctcatcacctggagaagccatcaggttgagatcataattcgatttctcaaaaacatggacgtcctccatatcaaagccgttttcactgttttcttcattttttgcatcctgaagcggataattttcaaacacaatgatgtggtcaatcagctttggctgatcggcctggctttggatgtcatagagcggcacatattgatgcggctcagactgcagcgattgctcctgcagctgcttgagcaagccgttaaatgtggtatcctcagacagcttcacccgcctcgggacagcattgataaacagcccgaccatatgttcaacgcctttgatttctgcgggacgcccggaaacgactgtgccgaagatcaaatcgccggactgctggtagcggctgattaatacactccaaaccgcctgaagcgccgtactcaaagtggtatgctgcgattttgcaagctcggtaaatgcttttgtttccgcctccggcagtgagaagagcagctctttcggctcatagccgtccttttgtttctttctttgctccgcaaatgtcgtttgtccttcaaaatcttctaagtacccgcgccagtaatgcagtgatgcttgtttatcctgcttttcaagccacttgatatagtctttatacggtttgaccggcggcaggctgtacggcttttgttcgcgcagggcattgtataccttaaacagatcctgcacgacgatgccgaagcaccagccgtccaaaatgatgtggtggtagctccacacccattcaaagctttcttccgattttttgaaaatggctgcccgcatcggaatatcccgcgtcaaatcaaagcccttgatcttatcctgttctttgtattcattgattttggctgtttgctcgctgtccgttacatgtgtcagatcgatttcttctatctgaaactgccgttttttcaatacgacttggaccggcctttttactttttcgtgaatgaacacggtacgaaatacatcgtaccggtccatgatcacattcatgctttcttcgaggcatttgatattcaagctgccttttactttcattgtcatttgttcgatgtaaaaactttggccgggattcaggagagtatgaaacagcattccctcctgcatcggcgacaaataatacatgtcctgaacttgatcttttttgaactggctcatctgctccgctccccccttctgttatctgtttttgtcacgttaaattctcctcaagcatgtcaaagatgtctcccatttcatccatctcaagatcctgcgcgctgaaatcgctcggcgtaaattctttctcctctttggccgtgcaatggccgatgatcattaagagattgtctttaaaccgctgcatctgtgtttcgacggtgcttctttcatattcttcctgattgtatgagcaggaaatgacgaagcggccgcctgtaaccatcccgctgaagctcagtgcgtataacgcctctgactcttcgctgacttgacgtcccatatcatatggagacggctcaaaccattccgttttcacttcattgtcaaactgccctaagtagttaaaactgatttcaggcgtgacgcctttttctgcttcatcggatgacagataccggagaatcccgtatcctacacctttatcaggaacgcgccgcaccgtctcttttaccgttttaatgacggaagagacgccgtcttccttgctgatctgcagaatcaaaggatattgggccgtaaaccagccgaccgtccgtgaaatattgacattcggtatgatttcttcccggccgtgtccttctaagttgatgccgactttgccgttttccgtccattcaccgatcgttaagccgagcgcgctgagcagaatgtcgttgatttccgttccgtacggatgatgaacatctgtgagcagctgtgccgtttcttcctcagtcaattcacatttcacggccgccgtatgtttgacgagccgcttgttcggatcatggtctttcggcagcggccggagttcttccgcatctgcctgcgcccaataatccgtctgctttttcagctcttctgattgcgcaaacgtgttcagcgcctccgcccaatctttaaaggagtgggttttttgcgggaggacgatgctgttttgctgctgcgcctgtttataacctgaagcgaaatcctcaagcagaattctccatgaaaccccgtccacgacgagatggtgaatcgcgattaacagatgatcgccttgttctgtccggtattgctccgcttttaacagcgggccgttctccagatcaagactgccctgaagatgatcggcaagccgctgaatctggcttttcagcatatcctcgtcagttccgtacagatcaacgatttcaaagcttgccttgcattctgtgacagggaggtatgtctgaatgatgccttccctttcttcacggtaaaccatgcggagcgcgtcatggtgttcaatcaatgcttgcagggttttttccaccaggtccggatcaaagccgtctttcgcgtgaagcatgacggattggttccagtggtgtttgtccgtgaagtttttctcaaagaaccagcgctggatcggcgttaaggccgcttcgccttcgacagggccctggtcggcctgcttgccttccgtccgctccacataagagacgagctcttcgatggtcggatgctggaagagatctttcatctccagcttgtagccgtgctggttcaggcggctcgccatttggatgcctttgatcgagtccccgccgagtgtgaagaaattatcgcttacgccgatctggtcaagaccgagcacttcctgccaaatgtcggaaagcagcgtctccatctccgtttccggcgctttgtacgcggcgcttcccgcttcaatgtcaggcgccggcagggcttttttgtcaatctttccgttcgcggtgaccggcagctcgtccatctccacccagaaagccggcaccatgtagtcaggcagcgtgtctttcagcgcggctttgagcgcttcaatatcgtcctgctgaggcgcgacataggcgcaaagcgcggtattgcccgctttgtcttccacggccgtcaccgctgcgtcatgaacgtccgcaagctgggcgaggcggacttcgatttctgaaagctcgatccggtagccccgcactttgacctgctggtcgatacgsccgatgtattcgatgccgcactgcgcgttccatttgacgaggtcgccggtccggtacatgcgctcgccrggcacgaacggatckgcggtaaaccgcttcgccgtttcttcttcacggttcaggtatccgcgcgccagaccgcggccggccacrcacaattcaccggcaatgccttccggctgcacctgatcgccgtcgccgagaatataaactctcgtattggcaatcgcccgtccgatcgaaagcgatccttcctccggattgatgacgccgcttgtcgcgacgacggtgttttccgtcgggccgtagttgttgaygatcgtgtacggctgtttcaccgcccgcttcagcttgtcgccgccgacgagaagcatgcggagggaggtattttccagctccataaattgttcggccagctgcgtcggcaggaaggtgatggtcacgccgtgctcttcgaaatagtgatttaagcgggtgatatccagccggatcgcttcgtcaatgacgtgaagctccgcgccgatggtccatgtcgggaacatytcccagatrgaggcgtcaaaaccgaagcccgcgtatttggcgcttttatcatccgccgtcatggcgaatgcgtcgtgatgccagaagcacaggttcaccagcgcatggtgytcgaccatgacacccttcggctgtccggtcgttcctgacgtgtaaatcatataagcgagatgatccgccgttgtttccgcctgcgggttcgcttcatcgttttcatcaagcggcaggctcaaaatggagcggctgccgtcaagcaggatcgtttctccgttgtagctgtccggcacgcccagcgcttcctgtgtgagaagaagcttggcgccgctgtcctgcagaatgtagctgatccgctcttccgggtattcggggtcaatcggcacaaatgccgcgcccgctttcaggacgccgagtacgcccgcggccatttccaaggacggtttcgtcaaaatgccgacacgttcgtcagccgtgacgccgcagtccatgagaatgcgcgcgatscggttcgcccttgcgttcagctcgccgtacgtccatttcgcgccgttrtatgccgcggccggccggttcgcgtagcgggcggccgtttcttcaaagagacggtgaaccgttttgtcccgcggcacagaaattgtttttcctttccatgcgtcaaggagggcttgtttttcagcatcgctgatcagtgagatctcaggcagctttctgtccggactttctgccgcttgcttcagaatccgcaggaacccggcgctccacttttcaattgtttcttttttaaacagatcagtcgcatattcaaactgaaggccgagaccttcttgatccgtaaagccgccgagtgtcagatcgaatttcgccgtgccttggtttgactcatacggagtgatgcgcaggttctccagttccagtgtttctttatccggatcttctgtcgtcaccatcacctggaacaatgggttacggctcatatctctcggcaggtcaagctttccgatcagatcttcaaacggataatcctgatgcgccagcgcgtcgagattggtttgtttcacccgttcgagcaacccggcaaaggtctgctcttttcgcgtttcattgcgaagcgcaagcgtattgacaaacatccccggcatttcctgaacttcagcgctcgttcttccggcggtcaccgagccgataatgatatcgcgctgccccgtgattttgctcaaaaagacatggaacgcggcgtgaagcaccatatgaagagtcgctcccgatgattccattaattcacgcaccgctttttccgtttcacgccccgctctgaaacggacggattgtcctttaaaactttgaaccggcggacgggggaaatcggtcggcagattcaattcaggaagctcgccggaaaatgcggagagccaataacgctcatggtctttcatccgttcggcctgctcgggttcattctgccagacggcgaagtctttatagtgcagggtcggcgacggcagacttccccctttataaaggtgagcgagctctttgaccagcatgcttctggacacgccgtcggcaataatatgatgcatatccagcagcagcaggtgtttcttttcattcagtctgacaagagcggcccgaatgagcggagccgcactcaaatcgaacggcttaatgaatgcctgaatgataagatccgctttctcctcgtctgctgcttcaaagatgtgcaggtcgatgtcagcctgttctgcgatctgctgcatcgggcggccgttttgatcgataaaggacgtccgcaaagattcgtggcgatcgatcatctgattgagcgcttcctgaagccttgaaatattgacttctccttccatcagaagaacggacggcatattataactgattgtctcccggtcaagctggttcaggacgtacatccgtttttgggcggatgataacgggtacgcgtctgcactgtcggccggtgagatcatccgatatccctcagataccgctgatttttcgatatatgcggcaagcatgcggacagtcggctgttcgaacagcgcttttaacggaaccgttttgtccagttcagcctgaatattggcgaggagcatcatgccttttaaagagtgcccgccataatcgaagaaattatcgtcaatgccgagcgtatccgtaccgagtgtctgtttccaaatgcggcacagcttttcctccaattccgtttccggcaaggctgaagctgtttgcgccgtttggctgacgcccggtttcggaagggcgtttttatcggtttttccgttggctgtgagcggaatgcggtctacttgcatgaaataagccggaagcatatgagacggcagtgtttcggaaagccgtttgcgaagctcagagcctttcagctcgctgtcggctttatagtacgcgcacagttccggcagcccgccttcgctgactgcgagaacgaccgcctcctgaatgccgtttacgcttaacagcacagtttcaacctcttttaattcgatgcggtagccccggattttcacctgatcatccgcacggccgataaattcaatcgtcccgtcaggaagcctgcggacgacatctcccgttttgtacatcaggctgtccggtgaaaaaggatttgagagaaatttctccgccgtcagctgcggacggtgaagatatcctctggcaagccccttcccggtaatataaagctcgccgcttgcgcccggaggaacgagctgcattgctccgtccaatacaagcgcgccggtattcgcgatcgggcggccgatgacgggacgctgttcatattgatcaaggcgctccatattgatccgtccggcaatggcgccgatcgtcgtttccgtcggcccgtagtgattgatgaagtcggtatgggcgtatacgtcatgaaacttgcggacatcggacgtgatgatcttttctcctccgagcaccactaaacgaagcgggctgaaacggcgttctgatgtaaaacgggctgtattgacgatcatatggaacaatgacggcgtcagtttcatatacgtaatgccgtttttctgtatatactcaccaagctgatcaggcgcggtgtacgtctctttcggcacaatgtgcagctcgccgcccgcctgaagaatcgggaatatagccgtatagccgaggtcaaatgcgtaagaagacagcagcacggatttgtcagcttcggtcaaatcggcttcacggctgaaccatgtgacataattgattagattacggtgctccagctggacgcctttcggtttgcccgttgttcccgaggtataaatgatatatgcaagctggtcggcgccgggctccgtttcaagccggtcggcgctttcgttctgccattctccgtcttccattacgaccgtttttcctttataaacggcggccgcggtcatgtttctctcattgacgaccagaagcttcgttccgctgtcttcaagagagtagcggattctctcttcaggagtccccggatcaatcgggagaaatgccgctccggctttcatgacgccgagaatcgcggtaatcaagtcggccgaacgatccatcataatggctacgatgtcctcactgcccgttccgcaagcctgaaggtgtcgggcaaaccggttcgagcgttcatcaagctcacgatatgtcagactagttccgcccgcaaccgccgtgagatcaggcgttttttgcgcttgccgttcaaacagcgaaacaaaagtgccctcaggcagatccgcctccgtacgtttttcatcaaaaaggagcgcttcccgttcaggagctgacagcaggcttgcgtcggccagctgaatatccggattttcggcgcaggctttaatcagattgacaaaatgagcgctccagcggcggatggtttcgtccgcaaataaggctttcgcgtaatcaaagctcaatccgacctcttctccgcgctcagccgcttctaaggaaagatcaaatttagcgacatgatgatgcatggagtaagaagaaatctccaaatctccgagccgcagggccgggatctccatgttctgcatattaaataacacgctgaacagcggactccggcttgtgtccctcgttaacggcagtttttcaattaattcttcaagcggatagctttgatgctcaaaagcttgaaggctcgccgttttcacctcatccagaaattgtttgaacgtttttttgccggcaggatgcgaccgaagcgcaactgtgttgacaaacatgcccggcacgtcttggagatcaggatgctgtcttccggccgccggagacccgactatgatatcttcctgccccgaatatttggacagcagcacttgaaaagcggctaacaagaacatgtacatcgtcgtatccgtatcagccagcagcttcttaatctgcgccgtcacctgtttatcaagcccgaagatgacgcgttccccttcaaaactgcgctcggcaggacgcgggaaatcaagcggcagatccaacaccggcagatcgcctttgaacgtatcaagccagtaggcttcgtgctgatcgagatttgctttttcacgctgccagactgaaaaatccttataatgaatctttggcagcgcaagctccgtgccttgataaagcttcgcaagatcaccgatgaaaatgcccattgagcttccgtccgtaataatgtggtgcatgtcaatcagcagaagatgccggtcttcttcaagccggatcagcttcgaacggacaagcggcgcgcggttgagcgcaaacggcctgataaaggcttttgtcagctcttctgcatcttcttcccggccctcggcggtttcaagctcaaacgacacatttttatgaatggtctgcacgacttctccatctgccatgtcaaacgacgtacgcaaggtctcatgacggttgattaatgcctgcatggcctcctcaagacgctttttgtctactgacccttccagcaaaagtacagcagggacgttgtagctcgtgctggcctgtccgagctgattaaggatatacatcctgcgctgtgctgaggaaacaggataatgcttctgataaggcgcttgtcggatcggttcaaactgctgttcctcctcgctctcatgctgcaaataatgcgcaagctcctgaatggtcggcttttcaaataacactttaatcggtacttctttttgaaagtgctcctggattttagcggtcatcatcatggcttttaaagaatgtccgccaatcgtgaagaaattgtcagtcacacccgcttttacaccgagaatgccttcccaaatgtcggcgagtttctgctccgcttccgttttcggcgcttcgtattcttgttgaacggcttcagcctgaggctcaggcagcgcttttttatcaatttttccgttcgccgtcagcggaaactgattcatctggatgaagtgcgcgggaatcatatattccggaagtgattccgaaagtgttttgcgcaggtcttccggcgaaagggcttggtctgccgtaaagtaagcgcagatttcattttcatccgctttatttttccggatcacagccgcagattccgtcacattctccgcctggctgattttcgcctcgatttcgccgagctcgattctgaaaccgcggacctttacttggttgtcaattctgccgagaaactcgatcgtgccgtccggaagccacttcgccaagtccccggtccggtatatcatttcatccggtctgaacggatcgcggacaaactgcttctccgttaattcaggcaggttcacatagcctcttgccactccgcttccgccgacgcacagctcaccgggcgcgccgatcggctggaggttgcggttttcatccataatgtacgcagtggaatttccgatcggcttcccgatcgggaccgaaccgtcataatcctgatcaatgagaaagctcgtcgaaaacgtcgtattctccgtcggcccgtatccgttccaaagcgacagctccggtgatgccttcctcactttgctgacgatatgcggcacaagcgcatcaccgccgatgatgaggtgccggagcgtgttaaacatgccggcatccttttgggcaagctgattaaacagcggagacgtcagccacatggtcgtgatccgctgctctttcagaaattgggcgaattgtccggcgtcaagcagcgtctcttttttcgccgggtgcaatgacgctccgttcagcaatgcgccgaagacttcgaaggttccggcatcaaagctgacggctcccgtttgcgccatccggtcttcttcatgaaccggcacgtaattcgaatgtttgacgagcctgatgatatttctgtgttcaatcatgacgcctttcggtttgccggtcgatccggatgtatacatgatatacgccaagtcgttgccgccggccggaagattcaagtctgttccgcttaccgtttcatccgcgctttcatccagcatgacgaccgggacttgcaatgcgcccgcttgttcttgatagtcctgaactgtcagcacgagccgaatcgagctgtcttccgccataaagcggagacggtcctccggaaaagccggatcaatcggcacatatgcgccgcctgcttttaggacggcaagcattccgataacggtttccgcagaccggtcgttcataatagcggcggtccggcctttttccagcccgctcttcacaaggtgtctcgccagacggttggccgcttcgttcacttcacggtaggtccattcgcgtcccgcttcttttatcgcgatgcttgcaggcgtccggtttgcctgtgcttcaaacaaacggtgaacggcctcctcttccggaagcgccgttttcgtatcattgaatatctcaacaatctgccgctcttcttcgcctgaaacaaggccgagttcccgcacgggcgcgtcaggcgttccgaccgcggctttcatcatgcgggtcagatggtgcgccgttcgttcgatggcatcatgagcgaaagccgctccgttgtatttgattttgacagtccacgtttttcccggatacacgatgagattgaaatcaaagctcgtctgctcaaaagcatgttcaactttaatggaaaagccgagtctttcctccatgcccccgttttccagctctttgtccagcggatagttttcaaacgcgaccaaatgatttaagaggctgccgtccagggcggagcgcttttgaatgtcatagagcggcacataatcatagcgctcggcttccacggcatttttctgaactgccgccatcacgtccgaaaaggctgcatctttgtcaatcttgattctgacgggaattgtattgatgaacagccccgccatcgtttctatgccgttgatttctgaaggacggcctgatacgacggtgccgaacaccacatcgtctgtatagttgcatttgctgagcaccgcaccccaaacggcctgaaacaggttaggccctgtgacttgatgccggttggcggtctgctgaatctgcgcgaccagctcttcatcccagacaaaagaatattcttcattttggtagtctttcttttctgatgccagacggcccgggagcaggctcggctgttcgaaatccgccagtcggctgctccaatattgttccgcctcctcataatcccggcctccgagccatttgatatagtcagagtaaggtttgccctggcttcccccggcaggccggccggcacgaagcgcttcatagttttggaacaggcttttcatcaaaacgcccatactccagccgtccatgacgatatgatgattgctccagacgagatacagctctttctcactgagtctgaacaccgctgctttaaagagaatatccttcgccagatgaaagccctgctgctgcacgccgcgtttatagcgttcaatatattcggtttggcgcgcttcatctaattgactgatatcttcatagtgcaccttcgtcttccgctcggctaatacgacttggcgcggtttttgaagctgctggtgcacgaataccgtacgcaggatgtcatatgtccggatcagctcattgacgcttttttcaaaaagctccagctgaaaacttccgtgaatcctaagctctaattgtgtgaagtaggaggaagaatgcggatcaagcagcgcatgatacagcattccctcctgcatcggtgtgagtgcatacaccttttgaatcgattttttgctcatatgtcacctctgtcttttctgttagagaatttccattaatttatcaagttcatcaagcgtcagatcatcatcgccaagatcgctaggcgtaagctcaggtccgtcttgggccaggcagtgatctatgattttcaggaggtgccctttaaagctgtcactgaacgattgaatggttttttcatgaaattcgagagaatgataggcaaacgtcatcgtcatctgcccattttctataaatccgacaatatcaagcgcattcggcttctctgtgtcagggctcagcgattgtcctgacggcatcccggatcttgtaaataagccggaatccgacatctcattaaactggcctaagtagttaaagctgatatccggatcaatctcaaatgaaagattctctttatgctcaggcgccgttacataacgcagaatgccgtagccgactcctttgttcgggatgtgtctgatgtcttctttcatttgtttcagctgatatgaaagatcgtcggcgtgcttcatctcaaggatcatcggatacatgctcgtaaaccatccgaccgtccgggtgatattcaagccgtcaagaatgtcttcgcgcccgtggccttccaaatgaacgccgatcgtgtcttcacccgtccactctttcaacgccagtccgagcgccgtgagcaggatgtcgttcatttcggtgtgataggcttcatgtacgtttgtcgtcagctgttcagtttgttcaggcgtcagagagaagctgaccgttctcgtatgtctcatgcgctgatcaccagactgcctgtctttcggaagctgagtgcatacctctttttcctcaagctctctccagtaatccgcttctttcagaaacgccttcgtatttgcgtattctttgattctctcggcaaattcggcgaatgaatgtgttttcggcggcagcgccggttcattgccttgcttcagctgcgtatacacggacgtaaagtcctccagtaaaatccgccaagatacaccatccacgactaagtgatggattgcgagaagaaggtggtctccatcttcagcccggaagagcccggctttcaagagatgtcctgtttccagtgaaatactgctttgaagacggtctgcttccctttcgatacgatcctcatggtcttcagcaggtccgttcagctcaaagacattcagttcaacagacgcatcctcaagccctctgtaatacggtttttgttcacgataaatcatccggagcgcatcatggtgcaccgtcaggacatgtaatgttttttctgttatctccggatcaaagccgtctttcgcgtgaagcatgacggattggttccagtggtgtttgtccgtgaagttcttctcaaagaaccagcgctggatcggcgttaaggccgcttcgccttcgacaggtccctggtcggcctgcttgccttccgtccgctccacataagagacgagctcttcgatggtcggatgctggaagagatccttcatctccagcttgtagccgtgctggttcagacggctcgccatttggatgcctttgatcgaatcgccgccgagagtgaagaaattatcgcttacgccgatctggtcaagaccgagcacttcctgccaaatgtcagaaagcagcgtctccatctctgtttccggcgctttgtatgccgcgcttcccgcttcaatatccggttccggcagggcttttttgtcaatctttccgttcgcggtgaccggaagctcgtccatctccacccagaaagccggcaccatgtagtcaggcagcgtgtctttcagcgcggatttgagcgtttcgatatcgtcctgctgaggcgcgacataggcgcaaagcgcggtattgcccgctttgtcttccacggccgtcaccgctgcgtcatgaacgtccgcaagctgggcgaggcggacttcgatttctgaaagctcgatccggtagccccgcactttgacctgctggtcgatacgcccgatgtattcgatgccgcactgcgcgttccatttgacgaggtcgccggtccggtacatgcgctcgccrggcacgaacggatckgcggtaaaccgcttcgccgtttcttcttcacggttcaggtatccgcgcgccagaccgcggccggccacacacaattcaccggcaatgccttccggctgcacctgatcgccgtcgccgagaatataaactctcgtattggcaatcgcccgtccgatcgaaagcgatccttcctcctccggattgatgacgccgcttgtcgcgacgacggtgttttccgtcgggccgtagttgttgatgatcgtgtacggc

SEQ ID NO: 6 - DNA, 153010 bp, Bacillus subtilis
atttccaaggacggtttcgtcaaaatgccgacacgttcgtcagccgtgacgccgcagtccatgagaatgcgcgcgatgcggttcgcccttgcgttcagctcgccgtacgtccatttcgcgccgttatatgccgcggccggccggttcgcgtagcgggcggccgtttcttcaaagagacggtgaaccgttttgtcccgcggcacagaaattgtttttcctttccatgcgtcaaggagagcttgtttttctgttttattcaccaatgaaagctcagaaagcttcgcagccggattttccgctgcggcttctaacagttgaagccagtaatgcttccatgtctctgccgtttccggtttaaacagcgcggtgttatattcaagcacaaacgttaaagcttcgtctgtgtcctcagccgtcattgtcaggtcaaacttggctgtttttctgtcaaacggatggtgcttcagctcaattccttccatgaccagatcttccgcatttgcattttgcattgagaataccgcatcaaacagcggatttctgctcgtatcacgctgcacctcaaccttttgcagaaggtcttcaagcggataatcctgcgcgtcaaatgcatgtaaagcggtttgttttacttctttaagatagtccgtgaacgttttgtccgcttccggatacgtacgaagcgcgagtgtattcacaaaaacaccgatgacgtttgcgagatccgcatgtgaccgtcccgcaaccggcgagcccacaatgatgtcatgctgtccgctcagttttgagagaaaggcgctgtatgtcgccagcagcaccatgtacatggtagaatccgtttgtttcgcaagactgcgaagagccgacgtctgttcctcagtcagagaaaagaccagcttgtctccttcaaaggtttgcacggccggacggctgtaatcagccggcagcgtcaataccggaagctcgccgtcaagctcccgaagccaatgctcctcctgcttgcggtactgctctgattgaataaatttctgctgccataccgcatagtctttataatgaatccgcaacggctcaagcgtttcaccgccgtacaagcgggacagttcatctatcagcacgccgactgaagcgccgtccgaaatgatatggtgcatgtcaaacagcagcaggtggtcatgttcagccagcttgaccagtcccgttctgacgagaggaagctgatccaggcggaacggccggataaagctctgaataatccgttcagcatcttcttcagaggcttcataatattccatgtcgatatcagcttccgtccatatgcgctgaaccgtttctccatcctgtatgtcaaatgtcgttctgaaggcttcatggcgttctgtcagctgtttcatgacggatttcagcttttctgcatcaagctttccttttaagcggagcacagacggcatgttatagcttgtttcagcgccttccagctgctgaagcacgaacatccgcttctgcggtgaagaaaccggatacgtttcccgctcggccgccggtgcgatgctctcagccgccttccgctcagccccttcaatcagctgcgccagccccgcagccgtcggagaagtgaacagatcctttaaggtaagctgcacgccgaatgtcttctggataagggccagcagtttcatccccgctaacgagtggcccccgatctcaaagaactgatcatggacgccgacacgttccatttgcagcacttcagcccaaatatccgccagtttttgttctgtttcattgcgcggcgccgtatatgacacggcattcgctgcggtcacatccggcatcggcagcgcccgcctgtcgatttttccgttccctgtaagaggcagttcatccaattgaataaagacggatggaatcatataagccggaagatccttcgccgtatgctccctcagctcccgggaagagatttccctgtgaccgacaacatacgcgcaaagaagtttgtcacccgcgccctgatccacagcgagcacaatgcattcctgaatctggtcatgactttgaagctgatgctcaatttcgccaagctcaatccgctgaccgcggatttttacctgatggtcgatacgtccgataaactcgatatcgccattcggaagccatctggccaagtcgcccgttttatacatccgttcaccttccttaaacggatgctttacaaatttttcttccgtcagttcaggacggttgtagtagccttctacgagtccttccccgctgacgcacagctctcccgcgatacccgccggctgaatgcgtccggctgagttcatgatgaagacttccgtattgctgaccggtttcccgatcggaacggagagcgtatcctcttcaatgacatccaccggatggtatgtcgcaaacaccgtgctttccgacgggccgtacatatgaagcagtcttccttttccgactgccgcaagcgcctttttgacatgttctacagacgctctttcgcccccgaacatgattttccgaagcatcgtcagacaggacggctccatatcaacaagcaggtggaacagggccgtcgtaatcatcagaatgctgacgttctcccgtttgatcacacgggacaggcgtgacatatccagcaccgtatctttcgggacgatcacaagctttgcaccgtttaacagcgaaccgaacatatcaaacataaaagcgtcaaaaacgtagtttgacagaccgagcactgtgtcctcttcagaaacagtcaaatagttcgtgttttttaccgtccgcaaaatgttggcatgtgtgacgatgtttcctttcggcgttcccgtcgtgcctgatgtataagtgagattggcaatcgttttggaatcaaacggcaatgctggattgcgagagtccttttcatagctcgcctcatcatcagcaagcacaatgacgccttgaaaaccggccttttccgcaatcggcttgaggctttgctgagtcaggagcacattcgccccgctgtcgcagaagaaatgctgaatccgctgaaccggatgctcaggatcaatcggcacataggcggaccccgcttttaacacagccataatggaaacaatcatatccattgaccgttcacacagaacagccgcggtttttccgccgcctccgaccgaaagaatatgccgcgcaagcctgttggcgcgttcattcagctgctgatacgacagggtttccccttcgaactgtagagccgtccggtcagggttctttcgggcttgttcttcaaagatctgcacgatcgtttgctctttcgggtataccgtgcgttccgggttgaaccgctgtaattgattcaaagcctcccgttcagaaagcagatcatattcgctgattttcgcatccggctgagctgccgcgctttccagcagacggacatagtgcgcaagcatgcgatccgcagttgagcgcttaaacagcttcgtgcaataatccaaatcaagcgcaatgccttccgctgtttcccgagcctgcatggtcaggtcgaatttggcgatattgaagtttgtttcatgaagagacagcgtcagattaccgatctccggaattccgtccgaggcgttttgcagactgaacatcgtgtcaaatatcggatgcctgctcatgtcccggggcacgttcagttcctctgtcagccactcaaacggataatcctgatgagaaaacgcatccagcacctgcttgcgcacatgacctaacaagccggcaaatgtctgatcctgcttcacggagcttcgcagcgcaagcgtgttgacaaacatcccgatgagcccctcggtatcggagtgatttcttcccgctgacggtgttcccacgatgatgtcttcctgtcccgaatacttagaaagcagcgtatagtatgctgataacagcaccatgtaaagggtggctccgtttttctccgcaagcttctgcagccgttccctcagcattttcggcagcttggcggacacgcggtcaccttcaaagctttgcacctgcggccgcggataatcagggagcagctgaagcaccggcagttcgccgctgaagacttctttccagtacgcccgctccttcttgtagccttctttcgcccgttccgcctgccatacggcataatctttatattgaatgcgcaattcaggcagctgatttccgccgtagatgtcagccagttccttcagcatgatggaaatagacaccccgtcagaaatcaggtgatgcatatcaaacagcagcatatggcgattgtgaccgagcgtttgcaggccgattctgaacagcggcgcctcagataaatcaaaacggcgcacaaagtccttcatgacctgttcattcgttcttccgcgcgcttcgatcatttcaatatgaaacggaacatgctcgccaatcacttgtctcggcgtgccgtcctctgattgaaacgatgttctgagcgcttcatgcctgctgattaaggcagaaaatgcacgctcaagcttttcacggtctaaagcgccctcaatcatggccgcagccggcatgttatatccgactcccgcgtcttcaaattggcttgcgatataagtccgctgctgagcgagcgaaagcggatagctcgcctgcttctcagccggctcaattgcactgaatgccggtccttcgtttcggttttccgcataatcggcaagcgctgcaatcgtcggatgctcaaacaagtattgcagcggaatttcaacgcccatttgcttatgaattttcgtcagaagcgtcattgcctttaatgaatgaccgcctgactcgaagaaatgatcataaatgcccgccttgtccattccgaggacttcctgccagatgacggcaagtgtttcctccgtttcatttcttggcgcggcatattcagatgagctgacagcctgcacatcaagcgcaaacagctttttgcggtccgcctttccgctcggcgtgagcggaatttcgtccgtttttgtaaagtaagcgggcaccatgtaatcaggaaggtgcttggacacatactccctgtactcggcagggtgaaactcggttcctttttcctgaacgatatatgcgcagacatctaagctgccctgctgatccggccgtgccagcacgacggcctgcgccgcgcccggagcttttctgagcaccgtttcaatttctcccagctcaatgcggtagccgcggactttcacctgatcatcttcacggccgatatattcgatcgtcccatccggcagccagcgcgccatatcacccgtgcggtacatgcggccgtttccgttaaacggatcttgcaaaaacttctctgcggtcaaatccggaagatttaaatagccgcggcctacaccgtcacccgcgatatacagctcaccggccgtgccgtcgggctgaagccgctggtgcttatccaatatatacagacgggcgttgccgagcggttttccgatcggaacgtacgccgcctgttgattcattccgttatccgctgacatctgatgcacggacgcatctacgcacgtttctgtcggcccgtagacattcgtcagacgcggcgtcctgcccgattgatgaaagagcgtcatcagctgttcagcaacagcggcggacaggccctctcccccaatgagcatgtggcgcaattcaattccgctgacatctcccgccgcaaccatcatctgcagatgtgcaggcgttccgtcagtggcttcaatccggttttgacgataatagtccagcagtgacgagccattcgttacagtcgttttcggcacgatataaagcgtctgtcccaaaagaagcgaggcaaaaatctgtttgacggacgcatcaaaatgaaacggagccaaaagcgccattcttaacgtctgctcaccgcattgataaatctcctgctgcagtgattgcaccagatgatgaacttgccggtgctcaatcatcacgcctttcggccgccccgttgtacctgacgtgtagatgatgtaagccagccggtctgattgtgtggtgacaccgtccgcagccgtctcatactgaacagcctcgtcaaaatcaatccgttcggcatccgctgcaggcgcctgtattccggcctccgtcagaacagccttcgctccgctgtcctccaaaatgtactgaatccgatccgccggaaagtcaggatctatcggcacataggcgccgcccgctttcaaaattcccaatattgccgcaatgacacgctcagaacggccaagcagcaccgcgacaggagaatcggctgatatcccggcttgaagaaggcgtccggcaatacggcctgactgttcatgcaatgtgcgataggacaatgttcggccttcatacacaaccgcgggtttgtcagacagtgacttcactttctcttcaaacagccccggaatcgtcatctccttgcggtaattcaccggattgccggaggcccgtttcagcagccgctctttctcggattcagaaagaagagtaagttcatcaattatgcgatcaggagatgaaatcgcatcttcaatcagcgtgatcaaacgttcagaaacagattcaatctcttcccctttgaaaatgtcgctgcgatagtcaaaatcaattgtcaatttcccggtgtcccatcgttccttcacatgaattgaaatatcatttgtaccgcttccgctgaaaatagggtctgtcaggaaggacagattctcttttttctgccactgcatcacctggtactccagagccaccgtaaacaatctgctcagcgaacttttcgaagcgcgcaaatcattgacaagcagattatacggatacttttggtggcggagaattttcatcagatccttcatccggcctttaacgaattccaagaacgactgtcctccgtcaacgtttgtccgcacaggcaccgtagatacgaacatcccgagcatctgcttttctttcgcattcgtccggtttcccataaacgtacccgtgaccacgtcatcccggccggtcactttgtagagataagtgatcagagctgactggaacagagatagtacgctgactttatgctcctcgcagaatgaatgaatgcggccatataagtcgtgaggaatttcttgagaaaaccgtttcgcatcaagacccgcatctgcctggctccgtttcagggacacaagctccggcacggtctcaaactgcccgttccaaaaatcccgatcctttttaaaccgcttcgactgcacatattcctgctctgtcagcacgtgctcaataaaagaaggaatctccgtctgttcctcacttgtcccgcctgaaagctccaaataaatatcagtaatcgcattgcccagaatcgtcatggaaatcccgtctgaaataatgtgatgcacattagcgtaaaaccagacctcattttcactgatcgtgtgcacggaaaaacggaataaatcctgatcatataacgccagaggcttgccagcttcttcacgcccccatttggacagctcgtccgcagagcagccggcttgcctgatatctgtgtgcccgatagagagcggacggtattcgctcacatattgaacgggctccccctcatcatcaagccgcagacggattctcatcgactcataccgccggacgaattcctgtatcgctttctcaacgtaatgagcctgtacgccgtcttcagaaatgagtttcccgaacccggcaagatttgaaatacttgtgttcggatagaatttttctgtataccagatacgtttttgagcatttgttaaaggataaaaagttatttccatatgtgtgcgcctcccctttttaagataaagttgtcaattctcccttagaaacagcctccctctatgtccctaactcattctcaagccaaaagaaccacttacctccaaaaacgatcccgattcaatcaccgccgaaatccgtcatccgttcacccgcgcagtccgaaatgcggcatcaaatttatgagaaatcaagacaaaaagccattgattgtaagcacgaaaggtttacctatttctgcatgtatttctatatatctacttacgttcactttatatgaaaatattgtttttatcaccgaaaaatgggtgaaaagtttcatgcggcacaccgaaaaaaaatccgacgaatccagagggtattttgcggcatcccgcaatttattttcaaaaatattatttacgtaaaattaaaaatctttaaactataatgaaaatctgtcaaatatccagttatggcagaatgaaaaaaatttacgtacgtaagctgacccggaaaaaacagcgcaagaaccgaaacagacggtccgaatgttcgcaatatgatttcattaaaccgcaaaaaaagcactctattttacatagagcacttcaaaaagattcctttattgcagttttatcaatgttgattaattccatataatcttttccccacttatacatggcgtccagaatcggcataaggctttctccttgcgccgttaaagaatactccactttcggagggacgacagggtaaacttccctgtgaacgatcagatcctgctccagctccctgagctgattcacaagaattttgtgcgtaatatccggaattaaagctttcagctcattaaaccgcttcgtcccttcttttcccaagtgccacataatcagcattttccacttcccgcctatcacggcaagcgtcaattccttttcgcaattaaacgttttctcatccattcggctcacgggccattctccttcctcttactttttgtacgttgatcatctattcatacacgcttacttttttacacaactttcatcagtttatagtaccacgcagttttgctgaaacaaagcgcattgcctgcggggacagtatcctaaaagtaactattagacttcaaagtgcgtacttctcaacatgcggggcactctatagaatggaaatacataaaaaagaggagtggatataaagtggaattacagctggcattagacttagtgaatatcccggaagcaattgaacttgtgaaagaggtcgaacaatatatagatgttgtagaaatcggcactcccgttgtcattaatgaaggcctgaaagccgtacaggaaatgaaatcagcctttcctcacttgaaagtgcttgccgatcttaaaatcatggatgcaggcggctacgagatcatgaaagcggcagaagcgggagccgacatcatcaccgttttaggagcgacagacgactcaacgatcaaaggggcggttgccgaagcaaaaaaacagcagaaaaaaattctcgtcgacatgattaacgtaaaaaaccttgaaactcgggcaaaagaaattgaccagctcggtgttgattatatttgtgttcacacaggttatgatcttcaagcagaaggaaagaattcattcgaggaactgacggcgattaaaaaagcggtcaagagcgctaaaaccgcaattgccggaggcattaaacttgatacgcttcctgaagccatcaaacaaaacccagatttaatcattgtcggcggaggcatcacgggggctgacaataaagcggatgctgctgctaaaatgaaacagctgatttcacaaggatcatgaaaacgactgaatacttacatgaaatactaaatgaaatatcccgcaccgcagcactaatagccgacagtgaagctgacaagcttgcagatcagattttaacggcagatcaaatcttcacgtccggagcgggacgttccggctttatggctaaagcgttcgccatgaggatgatgcacatcggtctgaacgcttacatcgtcggtgagacgcttacccctcccctccaagaaggcggtctcgtcatcatcggctcaggctcaggcgaaacaaaaagtctgcttcatacagctgaaaaagccaaaagccttaacggcatcatcactgcattaacgattaaccccgactcaagtctcggcaaacttgcggatcttacaataacgattcccggctctcctaaggaagagaccggcggagacagaaagacgattcagccgatgggttctttattcgaacaaactcttctgctgttttacgatgcggttattctaaaaatcatggagaaaaaagaattgaattcagcagacatgtttacaaagcatgcgaatctggaatgatttgctgacggccttcttatcagatggccgtctttttatcgtcttgttgcgcacggtgacaagacggccaagttttgcgggtcggacactcgcagacaaagatatcctgcggtgagcttatcgctataataagtcaattgacgatatacccgcaaccattcatttctgaatagggaaacggcaaaaaacactttctgattgaatttttaatgaataaagttgatttgtgcggatggttttacagatattcagctgaattgcggctgagaaatatattttaacagctttacagccggccgattctgctttattcttggaccagctttacagcaattaaaactggaggtgattgatactcttgaaaacattaaaagcactgctgcttgttcttatcatcattgccggagcagtcgcggccctgatcaagggtgatcttttctcagataacgagcagaccgttcagaagagtgattacgacaaagtaatcttatttccgtccgatcgatatccggaaacagcaaagcatattaaggacgcgataaaagaaggacattccagcatatgcaccattgacagagacggagtacataagcggcgtgagcaatctcttaaacatgtgcccgtcaaaacgggatacgatagagatgaatggccgatggcggtttgtaaacagggcggaaataatgcctccgtagaatatatttctccggcagacaaccgcggagccggctcttgggtcggacaccagcttaccaatgatcccgacggaacgagagtattatttaaaatcaagtaaaaaacaggaggaacagcgcattgaataaatcatggaaaccgcaagaactggccatttcttatcatcaatttacaatcttccaaaaagattcagaaccgcctgttatcgattggaccgatgaagccattgaaaaaggatatgcggaagctgacggagctgtttcatttgaggcaaggagaaatacgagggcatttatcgtcctcaggcttaacacaagtgaaccggtaccatcctatgagaaaaaagcgactgttccctttgaggctgtaaaagatggaattgagattgaaagcgtgatgtcaaagcggcttttctttcatattccgaaaggccgatacagccttacctgttattcagtgcctgccgaaatatccgatcttcatgcggatacgtatattattgatgcagccgcaatgtaaaagaaagccctgagagaatcttatttctctcagggaacttttataaacttttaccgtttgtttcaattacattctggtaccaataaaaactttttttcctgatccgtttcaaatccttttcatcttcttcatctcgattgatatacacaaaaccgtagcgtttttgatagccgttcagccagcttaacagatccgtgaatgaccagctgcagtagccgatgagatgaactccgtcactaatggcctctctgcactgttcaagatgggagcgtaaatagtcaattctgtagtcatcctgaattgagccgtcttcttctattttatcgaattcccccagcccgttttctgttataaaaaccggcagctcatagcggctcgttatacgccggaggccgatgcgcagacctatcgggtcaatcgtccaatcccaattactcgtcacgaggttaggattctttttcgttttaaacagccccggtataccggtatcctggtttgtccctttctgaccagtcgtgttcattttcccctccgatacaccgtcaagaggatttctttcgtacgtaatcgtctgataataattaacaccgataaaatccggcttgcctttcgcaagcaattccatatccccggcttcaatggcgggcgcccagcccttttcctttaaataattgaaaggaatttgcggataagttccccggcaatacatatcaagccaccaatgattcataaattcctctgcgttttcaaatgcagttatgtcttcaggatgacttgtaagcggataagccggtgaataagcgaagctcgggccgatcaaaccgtcaggaacatattgtctgaaggattcaatcgctttggcattagctaaaaatgcgatatgattcgcttcataaaatcgttttctgtcctttacgccgggcggatgtgcagctgtaataaacccgttatgaaaattataattctgctcgtttaacgtgacccagtatttcaccttgccggcaaatcttttgtataacgcaatgcagtaatcattaaaatcattaataatttttcttgattcaaagccgccgtattcatccatcagcgcctgaggcaagtcccaatgataaagagtcagcaccggctcaatatcgttagaaatcaattcatcgatcaggtcttcgtaaaatgcgatccctgattcgttgatttcccctctgccattcggaaaaattctcggccagctgacagaaaagcggtaagctttcaaacccatttctgccatcaaggcgatatcttctttataacgctcataatggccgactgctgtatcgccatttgagcctttaaacgttttacccggtaatttcgtgaataagtcccatactgaaggtcctttaccgtctttattccaggctccttcaacctgataggcagccgaggctgacccccatagaaatgtatcagggaacaggccctgttttttatgtaacatgtgtttcatcctcctgatgcgtatgatattgatatcatacgttatgaaacgcgtttcagagcaatcccgataaaaacaaaaaagcatccggcttgccggatgcttaagaatgatggtgccgcttttccaatttatgaggcggaggcttcgggacaaacccattttgtttcatcatgttaaagcgcctgtccatatgctgtttaatatgttctgctttttctttcggcaggaccccgtactcaacatatttggatataacatgttttcgtttttcgagcacttctttttcaagtgattcaatttcttttttctgctgttccgtgagtgacattgttgaaggcatttttgttccggcggcgtgtgccggcattgtgaaaaccattgctgtaatgaaaaatgcagctaaagacaatgcagcttttttcatgactctttcctcctttaacgtttgttatatgttgctccctcatccattttttatgcaaaaaaaagagcgaaattattcgctcttttcaatcgattcgtccggcagcgcgtatgtgacatacgttcctgctacaaaatcgtggattgaccgtttgtcttctctcattccgaccatgaatgcgctcacgatcacgccgattccaaacgtcacgccatatatcaggccgcccacaagcactctcaaaatcatagtgagaaagcctacctgagtgccgtcttttttgacgatgcggataccgcagatctttttgccgataacataaccgttccagtatacagggagcaaaatagcataaagagtcaaaatgatgctgatcattgtgctctcattcggatcttttcctgttgccagcataaaaataatcgccaaaggcactgaagtaattaaatagtcgagtaccacggctcccaatctgatccaaaatcccgccggtctgtaaatattcatcgtgtttctcctcgctatggctttaaaatcactttaatgttgccatcttcttttttgtcaaatatatcatatgcagcaggagcttccgcaagactcattttgtgtgtaatgatatccgtcggatcaatttcattttgttcgatcatttgatacagcatcggcatcagatgaataacgggtgcctggcccattttcaaagaaacgttgcgtgtgaaaaaatcaccgagcggaaagccgtccgcttcagaaatgtatgcgcccgtgagctgcacggttccgaacttcttaacggcttctgatgctgtaagaatcggactgatcgttccgaactgattcggtttttgctctgctttttcttttgaaagcggcgtgccgtccattccgacacaatcaatcactacatccgcgccccctgacgtatgttcatgcagcagtttcccgatctcatcatgttctgaaaaattgaaggtctctgctccgtttatgcgtctcgcatgttcaaggcggtgcgggacttgatcaactgcgataacccgtttagctccttttttccacgcgaatttttgcgccattaagccgatcgggcctgatcccagaataacgactgtatccccttttttcactccgctgtgctggacgctccaaaaggcggtcggcatgacatctgacagaagcagcacctgctcatcttcaagctcactgtctgccggaaccagaaaagaagagaaatcagcataaggaacacgtaaatattcagcctgcccgccgggataattaccgttaaactccgagaaaccgaataagccgccggcatctgtatgagggtttggatttgattcatcacactggctttccatctggtgcttgcaataatgacattctccgcagccgatgttaaaaggaatcacgacccggtcgccttttttcagctttttgacttgactgcccgtttcttcaacgattcccatcggctcatgcccgacgatataacccggatcggcgggtattccgtttttatataaatgaaggtctgaaccgcatatcccggttgcggtgattcgaacgatgacatctctctcatcttgaatggcgggtgccgggacttctttcacttccatatgttcttttccttggtatgtcagtgctttcacacttggtcagctcctttttcatcactccttcccttttcacctgcttctaaacttggccggtatgttattcggcccgctgaatatcccattgaaaaggatcttcaagctgcgaccaatcggaatcgaactcagacggcgtgagcaggcactgatccaattcctttgtaatggctgcttcatctaaatctgttccgataaacaccaggttcgtatgacggtctccgaattggtcgtcccaatcttccagaatctccggttcctgctgtttgatctgctcctgctcaagtttcggcattgccgccacccaataagaaacaggctcaatcgaaaccgccggacccgcctgagacatcagcagcgcaaggctgttgcgggttgcgcaccaagcaattccttttgcgcgcacaatgttgtcagggattgattgatgcagccagctgtcaaaacgagcggtatgaaacggcagacgccgcgagtacacaaacgaagtgatgccgtactcttccgtttccggagtgtgcgcttcatgacctgccgtcagttcctttatccatcctgctgatgaactcgcttcctcaaactcaaataaaccggtattcaatatgtattcggcgggcacttctccgcggacggaccggatcagtctggcacggggctgtaatgcgcgaaggaccgtttccagctgttcaagctctttttcgcccaccatgtcgcatttatttaaaatgagcacatcacaaaactcgatttggtcaattaataaatcggcaatcacccgttcatcctcttctcccgccgcttccttccggtcaagaaggctgtcaccggactggaaatcatgccagaagcggtttgcatccaccacggtcaccattgtgtccagcctgcagaatgttgtcagatcaatgcccatttcttcatctatataagaaaatgtctgggcaacgggaatcggttcgctgatccctgttgattcaatcacaatataatcaaatctgccgtctttcgcgagtttctcaacttcgactaatagatcctcacgcagcgtgcagcagatacagccgttggataattctacgagtttctcatccgtccttgacaagccgcctccctgcttcaccaatcccgcgtctatatttacttcgctcatgtcattgacgatgacggcaatttttaaaccgttgcggttttgtaaaatatgattcaaaacggtcgtctttccggcaccaagatagccgctcaatactgtaactggaatttttttcatataaatagcctcctgacaaaatagaatgattacgatttatatcccgcacctgcccctttttcatcatgatgtacattgttataaatcgtaaccgttactatttattctgatatattctccgtttaaaatcaagtgaaaaataatcaatcataaaaaagacacgctgtcatacgtgtcttccgcccaaacttaaacatccgcaggactgttttcagtgccatagctttttctccaaaaatagcctgcggccagaacaagcacaaatgcgagcaatgcgatacatgaaaaagagataaaaccgatcgcataagttcccgtcatctgcttcaatgatcctaaaatattgggaaggaaaaaacctcctatgccgccggccgctccgacgattcccgtcaccattccgatttcttttgcaaagtgctgagggacaagctgaaatactgctccgttgcccataccgagcgccatcattccgataaacaacagaacgatcaccgttgaaagcggaggcaggctgctgactcccgccatacatagagccgcgatgataaacagtacagcgagaactttcgcacctcccgcacggtctgaaatccagcctcctgcagggcgaaaaaaactgcccgctgcaacacatattgtgacgaaatcaccggcatggatttttgacaattgatattgatcaacgaaaaaaatcgccaaaaaacttgataatcccacaaaacctccgaaagtgacgccgtacaaaagacagaaacaccatgtctccttctgcctgaaaacgtgaagatagtttttaagcggctgcggtgcgggctgtgcaggagagtccttcgccatgacgataaacagtataaaaacgaccatcaacggaaaaagcgcaattcccattacactgtgccacccaaactgttccgcaaggcggggaccgaacaatgtcgcaaacaaagtgccgctgttgccggcacctgctatccccatcgcaagcccctgcaagtgaggcggataccaccggctcgccatcggaagcgcaacagcaaaacttgcgcccgccacgcccagcagaatgccgatcgcatacagctcagtcaaagaacggccgccgaatgccccccaaagcagcgggatcatcgtgatcagcatcccgatcacggctgttttcttcggcccgatcctgtccgttaacacacctaaaatgatccgaaacacagatcctgataagatcggcagagccacgacaaaccctttttcaaaagaagataacccgaaatcctgagaaatataaacgccgagcgcccccagcattacccaaatcataaaactcacatcaaaatataagaaggaacagagcagagtgagcggatgaccgcttgtttttaattccgacagcttcataacattctcctttccggtcttctatcatttcaaattgctgaatcaagaatatatgaccggcattcaccggaaaagacatgtgtaagataatgcgacacatttaatgcgttaatcaggcaatgtgccataatttctcatagaagaaacgattacttacagactgccgcaaaggaggtttggcgagtgaagaaacaaagattaattgcagcagggaacggaatggccggaatccgctgtattgaacacattttaaagatgaaccgtgacatgtttgagattgtcattttcggaagcgaacctcatcccaattacaatcgcattctcttatcctccgttttacaaggtgaggtttcgcttgatgacattacgctgaatagccgcgaatggtacgaaaaaaacggaattacgctttacacgggagaaacggttgtagacattgatacagaacggcaggttgtcacaacggatcgaaagcgcagcatgacttacgatcaaatcatccttgcaacgggctcctctccttatattctccccatacccggagcagataaagaaggtgtgtacggctttcggacaatagaagactgccaatctcttatcaatgcggccggccggtatcaaaaggcggcggtcatcggcgccggtttattaggtcttgaagcggccgtcggcttacggcagctcggcatggacgtcagcgtcattcaccactcttccgccattatgcaaaaacagcttgatcaaacggcatcccgcctgctgcagaaagagctggaacgaaaaggcttagtctttcttttagagaaagacacggcatccattacagggaactcacgggcggaaggcatccgtttcaaagacggttcttccatagaagcagacctgattgtcatggccgccggtgtgaggcccaatatccgattggctgcatctgccggactttcagtgaaccgaggaatcatcgtcaatcaattcatgcagacgaacaaaccgaatgtgtatgccgtcggtgaatgcgcggagcatgacgggattgtatacggattggcggcgccgctttatgaacagggaaaagtgctcgcgcagcatctatgcggcgtcccgtgcgaagggtttcaaggctttgcacaatctgcggccttaaaaatagccggtattgatgtatggtcggcaggaaaggtgcacgaggatgagcacacagccggcatattgttccatgatgagcatgcaggcatctacaaaaaagcgctctttaaggacgataaaccggccggctttattttattcggggacacgcgcggtaaacagcggcttctcgacagtcttgtgaagcaaagagatatttccatcgtgaaaaaacagctcatggaaccggatcaaggcggtatatcctttgaatccatgcctccccatgaaaccatttgccaatgcagctcagtgaccaagggctccattgaagaagcggtgaacaaatatggcttaaaaaccgcggaggaagtgaagcacatgacaaaagcatccgggtcttgcggaggatgcaggccgctcgttgaagacttgctgaagtatatggcgagcgatgattacacaaaaccctcccgccagccttcgttttgcggctgcaccgatttgacggaagaagaagtcatcgccgaaattcgccgccgtccgttcactgatgccgccgaggtaatgaaagtgatcggctggaaaacagaaaacggctgccgcatttgtattccggcgcttcactattacatggaaaggatgcggcctgattttatgcagttcaatgaaatatcggcagaagagacatgcaccctcattccgcaaatgtacggcggactgacaagtgcggcagagctcaaaaacatcgcagacgtcatcgaagcatacggcatccctggggtttcgatgactgacagtcaccggctgaggctttccggaatcaggccaaatgaccttgcaagcatcagaaaagcactgaacatgccggttttctctccccggcaccgcaggacgattcaaatcagagcatgtacgtgcggacagtatcgctcctttcaagagctggcaagcaggattgaacgagataccgatacacttgccgtacccgcttatgtatccgtcagtttgtcatgtgaaaacaattgcaccgatgcttacattcaagatatcggcgtgcttcagacacaaacttgctgggagatttatatcgggggcgtccgcggaaaacaagcccgcgccggcagccttttttgtgtgacggataacgaagacagtaccgccgctatgatgaaaggccttactcaatattatcgcgaaacggctcactacaacgaagcgatttatcaatgggttgacagactcgggctcgtccatatcagagaaatgctgtttgaagaagatatgcggacacagcttctgaaaaatctccgttcagacatatccctgctgcaaaacctgtctgccgggaaaacgccatacgaaaggatgaagctttttgactgaaccgatgctccgttatttccgtgacaaactgcaagatgtccaatcggaaaaaacatatgagacgcaatgcccgttctgcagcatgcaatgcaaaatgcagcttacggaacaaaccttcgcggcacggaagaaatacactgcaatcggcattgataatccgacgacacatggccgtttatgtacaaaaggcatgaatgcccatcagcatgccgtgcactcttcccgcattacacgccccctgcttaaaaaaaacggtgaatttgtgcctgtctcttgggctgaagcactgaatcgcattaaggaacaaatcaatctgatccaaaccgaacacggcaatgatgcgatggccgtctacgggagcgcctcaattacaaatgaagaagcctatctgcttggaaagttcgcacgggtcggcttacagacgaaatacatcgattacaacgggcggctctgtatgtctgccgcagcaacggcggccggccagacattcggcgcggacaggggcctgacgaatccattatcggacatcccgcatacacgtgtcatcatcctggcaggcaccaatatcgccgaatgccagccgacgatcatgccgtattttgataaagcgaaagaaaacggagcttacattatcgccattgatccccgggaaacggcgacgaccaaaatagccgatcttcacctgaaaatcaagcccggcacagacgcagccctggcaaacggactcgtcaaaatctgcattgacgaacagcttacagacaaagactttatccgcacacgcacaaacggattcgataagctcaaacagcataccgacgctttggatctgaaagagatctccgagcagacaagtgttcctttggagcatatacgaaaggccgccgtgaagtttgccaaggaaacatccggcatgctgtttacagcgcgggggatcgaacagcagactgacggtaccgcggcagtgaaagctttcttaaatatggtgctgatcacgggaaaaatcggcaagcccttctcaggttacggggcgattaccggtcaaggcaacggacaaggcgcgagagaacacggccaaaaagcggatcagcttccgggctaccgttctatcgaaattgaagaacaccgggcgcacattgcgaaggtgtgggggattcatcaggaagagctgccgcgaaaaggcgtctcagcctatgaaatgatagaaaaaatagatagcggcgacatcaaaggactgttgctcatgtgttccaatccggctgtttccggcccaaatgcgaatttcgtcaagcaggcaatcaagaaactgagattctttgtcgcagttgatttatttatttctgagaccgcggcattcgcggatgtgattttacccgcctcctcttatttggaagacgaaggcacgatgacaaatgtagaaggccgcgtgacattaagagaagcgagccgcacctgccccggagaagcgaaacatgattggcagatcatctgttacattgcctcggctcttggtaaagggcattattttccctatacgtcggcggaggaaatctttaacgaactgagagaagcgagccgcggcggaattgctgattactctggcatcacctatgacaggctcaggcgggaaggcggcattcagtggccatgtcctgaagcggatcatcccggaaccgggcgattgtttgagcactcatttgcccatcccgatcacagagctgaattaagcgtgattccaaatgaaccggccgtcccgaaagagaaaccgagcgccggctatccgctttatttaaccacgggcagggtgatgtctcattacttaacgggtgtacaaacgagaaaaagctccgccctggctgcaagacatttcgaatcctttgtggaaatccacccaaaaacggcggccgactatcatatcgaagaccgtgttctcgtgaaagtagaatccccccggggcagcatcacggtccggagcagatggtcggagaacgtacgaaaagacacgttgtttgttcccatccattggtctgacacgcaaaacgtcaacaatttaattggtgaagccttggacccggactgtaaaatgcccggttttaagatgtgtgcggtacgaatcagccctatataatttttcataaaatttttagattttttagtattttttgttacatttcataacatgcatcttaaatatttgtttttgctgtgctacgctaaaaaaaacaaagataaggagcggatcatctgatgggaaaaaaacagctagtccttgttggaaatggaatggccggggtaagagcgattgaagaaatactgcgtgtttcacaagacgaattcgagattacaatattcggggccgaacctcatcccaactataaccgaatccttctgtcaaaagtgctgcaaggcgataccgacattcaagacattacgttaaacgattggaactggtacaaagaaaacaacattcagctgtataccggtgaaacagtcatcaaagtcgacacggaaaacaaaaccgtcatcaccgatgcagacagaatccagccttacgatgaactcatcctggcgacaggctctgtcccttttatccttccgattccgggcgcagacaaacaaggcgtcacggcattccgggatataaaagatacagacacgatgctcgccgcgtcaaaacaatataaaaaagcagccgtcatcggcggaggactgcttggtttggaagccgctcgcggactgctgaatctcggaatggacgtgtctgtcatccacctcgccccattcctgatggagcgccagcttgacgcagcggcgggacgcctgctgcaaaacgaattagaaaaacaaggcatgacctttttccttgaaaagcaaaccgaagaaattctcggtactgaccgtgtcgaaggggtacgcttcaaagacggcacaagcatcgaagctgacctggtcgtcatggcggtcggcatccgcccgaatacacagcttggcacagaaagcggcattccggtaaaccgcggaatcattgtcaacgattatatgcagactgacattccgcacatttacgcggtcggtgaatgtgccgagcaccgcggaatcgcatacggtcttgtggcgccgctctatgaacaggcaaaagtgctggccaaacatatttgcggcattgaaacaaaaccgtatgaaggctccgttctctccactcaattaaaggtatcaggcgtcgaagtcttctctgccggtgactttaacgaatcagaggacaaaaaagcgattaaagtgttcgatgagcaggacggcatttataaaaaaatcgtcctgaggggcaatcaaattgtcggcgctgttttgttcggagacagcagcgagggcagccgcctgttttcaatgattcaaaaagaagccgatatctctgaaacctccaaaatatcaatcttacagcctcttgatcaggaagcaggcgcaagcatgaccgcggcgatgagcgacgatgaaatcatctgcggatgcaacggcgtatcaaaaggcgcgattattcaagccattcaggaaaaaggctgcacatctacggacgaaatcaaagcatgcaccggggcatcccgttcctgcggaggctgtaaaccgctcgtggaagacattcttcaatatacactgggctcagaatttgacgcgtccgcgcaaaaagaagcgatttgcggctgcacatcactgtcgagagatgaagtcgtagaagaaatcaaagccaaagggctgtcccatacaagagaaatcatgaacgtgctcggctggaaaacgccggagggctgctccaaatgccgtcctgccctcaactactacttaggcatgattaatccggctacatacgaggatgacagaacatcccgttttgtgaacgaacggatgcacgccaatattcaaaaagacggaacatactcagtcgttccccggatgtacggcggcgtgaccaactctcaggatctccgcaagatcgccgatgtcgtcgacaaatatgagatcccgctcgttaaaatgacaggcggccagcgaattgatctcatcggcgtcaaaaaagaagacctgccgaaagtatgggccgagcttgatatgccgtcaggctacgcgtacggaaaaacactccgcacggtaaaaacgtgcgtaggcgaacaattctgccgcttcggcacgcaagactccatggcactgggcattgcgcttgagaaaaaattcgaagggctcaatacgcctcataaggtcaaaatggccgtgtccgcctgccctcggaactgtgcggaatcaggtattaaggaccttggcgttgtcggcatcgacggaggctgggagctttatgtcggcggaaacggcggaacccatttgcgcgccggtgatttgctgatgaaagtaaaaacgaatgaagaagtcttagaatatgcgggtgcttaccttcagtactacagggaaacggcaaactatctggagcggacatccgcatggcttgagcgcgtcggtttatctcatgtccaatccgtattaaacgatccggaaaaacggcaggagctcaacgacagaatgaatgagacactctctgtccacaaagatccgtggcaatacttccttaaagataaaaaagcatctaaagatctatttgaaaatgtcgtcacgacttcataaaacagtaagggggaacggacatggttaataaagatatgacaaaggtttgcataggcaaagtaaacgaattacctgaggagttaggaaaaaccgtatatatagaagataaagagcttgccgtatttaagctttctgacgggagcgtccgcgccgtcgaaaaccgctgtccccataaagggggcgtcttggctgaaggcatcgtcagcggagaatacgtcttctgcccgatgcatgactggaaaatctccttagaagacggaaaagtccaagagccggatcatggctgtgtcaaaacatacgaaacactgattgaaggagagaatgtatacctcctgtattgagcaaagaccggatcactttttcaagtggtccttcattttttaaattgctgaagggatgacgccatcatgaaaaacggaatcgtatattttgtcggtgccggaccaggagacccggggctgatcaccgtaaaaggaaaacaggctctggagaaagcggatatcattttgtatgaccggctcgcaaacccaaagtttcttgaatatgcctcaccggactgccggttcatttattgcggaaagctgcccgaccgccattttatgaaacagtctgagataaatgccctgctgattgaaaaagcggcggaaggctgcaccgtagtccgcttgaaaggcggagacccaagtgtgttcggcagagtcggcgaagaagcagaggcgcttcatcagcacggcatccgctacgaaatggtgcccggcatcacctcgggaatcgcagcgccgatgtatgcgggagtccccgtcacccatcgtgatttcgcttcgtccttcgcgatgatcaccgctcatgatacatcattgcacggcaggccgaatctcgactgggaagggcttgcccgaagcgttcaaacgcttgtgttttatatgggcgttaaaaacctgtcatttatatgccgtaagcttacggagtacggtaaatccccttccgttcccgtactcgtcattcaatgggggacgtgggggcggcagcggagcgttaaaggaacgcttcaggatatccatgaaaaagttcaaagccaaaacatcaccaaccctgccattatcgtcatcggtgatattgtcaattttcaaacacacagctggtttgaaagcaaaccgttcatcgggcggcatatcatggttgtcactcatggcgatgaagaacatacattgacagacaagctgcgcgagtatggcgccgatgttattgagtggccgaagcggatcgttaaaaaaatgcccgcaaacgaaaacatcctgaaacagatcagcacctttgaacaactatttttcacatcacgccttgcggtatgcgaattctttgacacactggctttcaagcagatcgacatccgccgggtgaccgcaagcctgaatgcagcgactgagaccgcaaagacggaactgacaaaacggggctttctcctatccgaatgtcaaattgattctccgcattcactcattgtaggaagccgtcaagcagcagaaaacttgtcagactcaaaatcatgcccgttttatatcacccatgagcatatcgcagatgagcggttcacttccatgatcgaacgcacgatcagtgagtctcctctgcaaatgattatctgtacgggcaaagaatccgctcagcatttgatcagcgccggaaaacaaatcggcatatcaccggatccatcggcaaaccgccctcccgtcatctgcatgggtgaagacattcccgccggctgcgagtttaccgccgtgaaaaatcaggaacagttatttgcgtttatacgaaatgaaatgaaagacatgctcgttcacagctgatacgccggaatgcttttctgacccccaggctcaacatcgggggtcagcccttttttattgtgtcaccaattttttatgatgagtcgaatacatcgccatctgttccgcctgcgggtccaaataggctttggcgctgttcacggcggtcggcccctccgtgaaaccgcctgcaatcaatctgagcttgctttcataatgggcggcgtcaccggcgacaaacacgcccgaaagattcgtccgcatatgtctgtcagctttaatcctgccttcttctatctcaagcccccagtccttcatcggaccgagatcaattttaaacccgtggttgataatgagctcatcaagcttgatgacttcagaaagtcccgactcagtttggcaaacggtgacgctctcgatccgttctccggtgccgttgagatgcttcagacgatatggcgcaagcacccgcacggaagaccgcttcattttcgccacgctgctttccaaaccgccgaactcctccctgcggtgcaagacggtaacagacgccgcaatcggttccagctcattcgcccagtcaaccgcggtatctccccctcctgaaatcacgacatgcttatctcgaaacgcatcaagcttctccaccttataatgaaggttctttcctgaataacggctcgcatccgcgctgtcaagttcattgacctcaagcgttcccatgccgacggccaaaatcaccgtgcgcgtatagtgcttttccccttcggaactttcaagcacaatggttccgtcttccagccgttcaaatccggtcacccgctgattcaacacgatatccggctcaaatgtcgccgcctgctccttcagctgcttaatcagctgttctccggcaatcccgggtattccgccgatatcacggatgattttttcagggaaaaacatagacactttccctccgagccgcggcaaaaactcgatcactttcgttttcagctcacgcatcccgcaataaaaagccgcaaacaggccgatcgggcctccgcctataatcgtgacgtcgtacacctcatgattttccgccatcgttctgcctcccgtttatatctatacttcataaatttttaattgagaatcaatatcaatgaaagtataacacatattgaggatcagtgtttattcatttctcatcttgcgggaaaggagtgattcagaagtgaggttctgagattgataagcgggaaggtattaaaactgaaaccagtacggcgactggtttcttttttatctctttttcatcagcatgatatcgagatacagctggcaccttgtcctgaagtcgtttaaattaattgatgtcatgtcaagaatctgtttgatacggtagttcaatgtgttttgatgaataaaaagctgttctgcggctggttttgttttgcagttattgaggagatagatttctaacgttttcagcagttctgtactgctttctctgtctttggcttttaataacgctaaatcattgtttacatattccagtgaggcgtttttttcttcgatactttcaagatagcggtaaatcccgagcttactgtattcgtacgggatattttcctggtttccggtaatttcggcggcctttatgacttcaagggcctctatataacttttgccgagcttcaggatgctgctgtattcattgccgattccgatatagatgggagtggggatcttctgaaagtgaaaatgagtcagcagtttgtggatgaattcagatgctgccgaagtgccggagcttttttgcgagaagcttgcgacgacgatgacaatattggaatcaatggttaagacgtgactgactttatcccgcaaattcaagtacgatttgatgttttccttcacatcttcgactgcctccccatccccatttgcggcgtgcaggacgactaccgaaaaaaccgatggcagcacggcgttcatcttttccgcttcccgcctgaactccttttcagaggagaattgctgaaagatcgcccgtttcaccaggtcttccgctctctcttctttttcctgtttcagccggttcgttttatagatgatttttccgacatggaatgaagtttcatataaaaaatcgagctcctcgtccgtcaagtttcggtcgagctcctgaatccagatgtagcccatcacttcgcctttatgttttgcgcttacaaccactctctgattcagtccgatactgtctattttttcgacacggaacggttcaggaacggttttcagcttttcgatcaccccgtccttcagaaacctttcaaaaatctgcacggggcatttttttgaaaatatcgtctgctggttggcggagtcgaagtgattaatgtaataagaattataggcaagcaaaaagaaatccgcgctttccagaataacgggcttctgcaattcataactgatgaaatcaattaatttatcaatgtccgtaaatgaaaaaactctctctaaaagctcttccatacctatttctcctatgctctttttatctttatcatactctgcggggtgactttttgtatagaaaaaaattcacatattcccaaaacggcatgatccgaaagcctgtatcgtgaaaagaggaaaaagggcggtcccttcttcctctcgttccttgcttttattgagaaagtgtatcaccgtactcatgaaactgatctgtgacatcttttgacggagcctgtgtcaataagctgacgacaaatacagcggcaaggcttacagcaaagcccggaatgatttcgtacaaaaagtctgaaagaccggcattcgcccaaatgattacggtaatcgctcccgcaatcatgccggcgagtgccccccatttcgtcatccgtttccaaaataaactgagcagtacgaccggcccgaatgaagcgccgaatcccgcccatgcatagctgacaagaccaagtatcgtgttatttttctcccaggcgagcaccaaagcgatgattgacaccgcaagcactgccattctccccagaaatacgagttccttatcagaagccgaacgcctgaacatggacttatacaagtcctccactaaagaactggacgtaacgagcaactgagacgaaatcgtactcataatggccgctaaaatcgcagaaatgagaaatcccgtaataatcgggtggaacagaatgttgccgagctgaataaaaatggtttccggatcagccagcttcagtccgttctggtggtaatacgcgattcccgcaagacccgtaaacagcgctcctagtgcagacaaaatcatccatcccattccgatccgtctggcgcgtttgatttctttcacagacgtgatcgccataaaacgcacaataatatgcggctgcccgaaatagccgagcccccacgcaaataaagaaataatgccaaggacggtcgtccctttgaacatgttaaacagttccgggttgacggaacggatatcggcaacggtttcccccgggccgcccgtatggaaaatcgtcacaatcggcacaagaataagcgccgcaaacataatgatcccttgaacaaagtccgtccagcttaccgccaaaaagcctccgaacaaggtgtaggcgacaacgacgcctgtcacgacccacagccccgtgtggtacttcaaccctaaaatgctgttgaacaagacacctccggataccatgccggatgatacgtaaaatgtgaaaaagacgagaatgacaagacccgaaaacagtctgagaagcttcgtatgatcaccgaaacggttttcaaggaaacccggaatggtgatggaattccccgctttttcggtatacgttctcagtctcggcgccacgaaaagccagttcgcccacgccccgagcacaagcccgagcacaatccaagcgccgcttaatcctgtcgagaacatagcgcccggaagccccatcaagagccatccgctcatatccgccgctcccgcgctgagcgctgtgacggcagggcctaaagaacgccccccgagcatgtaatccgtcagatttgacgtccgtctgtaggcgaaataaccgataaacagcatacccgccatataaatacaaatggaaataatcaactgaatgtttgctatggcatttcctcctccgctttatatgtttatggtgaaatggacaccccccgcgaggaggatgcccattcagtccctcttaaaacgtttcactgattgttttcgcctgcatgtggagggccaaataatccgggccgcccgcttttgaatcagtgccggacattttgaagcctccgaacggatggtagccgacaatcgctcccgtacaattgcggttgaagtacaggttgccgacatggaattcctgtttcgcccgttcaatatgtttgcggttatttgtaatgaccgcgcctgtcaaaccatattcagtattgtttgccacttctaaagcttcatcaaagtttgacactttagaaaacgccacgacaggcccgaaaatttcttcctgcatgagtcttgctttcggatcaaggtcagcgaagatcgtcggcttgataaagtagccttttgaatcatctccggtgccgccgcttactaaacggccttcttcttttccgatttcaatgtagctcatgatcttgtcgtaagaaccttggtcgatgacaggccccatataaacatctgcactgtcaggtttagcagttacttttgattccgtaatttcaatgacacgctctaatacttgatcatacactttttcatggacaactgcacgtgaacctgcagaacatttttgtcccgcgaagccgaatgctgatgtaaagatggattgagccgccaattcaatgtccgcatcttcgtcaacgacaaccgtatctttaccgcccatttctgcaatgacacgttttaaatgctgctggcccggctgaactttcgccgcgcgttcgaaaattctcgtaccgacttcacgtgatcctgtaaatgtgataaggcttgttttcggatggtcaacaagataatcgcctacttctgctccgcttcccggcacaaagttgactacgccttttggcaatccggactcttcaagcacctcaacaaattttgctgcaataacaggtgtagcactcgcaggttttagaaccactgtgtttccagtaacaatcggcgccactgttgttcctgccatgatcgcaaacaagaagttccacggcggaataacaactgtcacgccggtcggcgtgtacacatattggtttttctcgccctcacggctgttgaccggtttgccttttgccagttcgatcatttggcgtgcataatactccatgaagtcaatcgcttccgccgtatccgcatcagcttcgttccaaggttttcccgcttccttgacgagcagggcggagaattcgtgctttctgcggcggactttggcagctgcgcggaacaaaacggccgctctttcttcaggggatgtgtatctccactcttcgaacgctttcgcagctgcttcaatcgcttgctcagcgtgctcctgggacgcctttgacacttttccgacgacttcttctttatcagccggattgattgaaacgattttcgcttccgtctctaccttttcaccattgatgacgagcggataatcttttcccagatactcatttaccgtcgcaagcgctttcttaaattcttcaacgttcgattgatcttggaaattcgtgaatggttcgtgtttataaggtgtagtcattgtcatctctcccttttttacttcttagtcattcctttaaaggcgaatgcgatgtttgaggggcgttcggcgagccgtctcatgaaatagccgtaccagtcatccccgtaaggcaggtagactctcatgcggtatccttcttccaccaggctgagctgggtttgcgagcgcatgccgtacagcatctgaaactcaaaacggtcgtttggaatgccgtgctctttggcaagctgttttgtaaactcgatcattttgtcatcatgcgtggcaactgccgtataatgtccttttaaaagctgtttgcggatgagtcttttataattttcatcgacgtcgcttttttcaggataggccaccttttccgattctttataggcccctttgacaagccgcagaaacggattcagcgggctgaggtcatcaagatccttctccgttctgtacagataggcctgcaccacggtgcttacatattcataccggcttcggaagtctttaaagatatccagcgtcttctggcatctcgtttcatcttccatgtcaatcgtcaccatgactttatgtttttcagccgtctggaggattttcgtcatattttcatagacgagatcgagatctatatcaagacctaaagacgtcatttttaatgacacttgggaattcagctgttcatcagcgattaaggcgatggtctgcatgcactcctcggtgcgttctttcgcaacatcaccgctgttgacaaattcccccaaatgatcgacagtaactgacagcccctggctgttcaaatgtcggattgtcgggatagaactgcggaaatccattcctccgatgattttgccggctgccacacggcttccccagcttcgcgccatcttattgagaaagctgctcttggataaaaataagaaaaaatctcttgtaatcacttccaaccttaacaccccgcaatctaagaagtatttgtatgagtctattgtaaatggacaaaacatcctctcacaatattctaaaaatacaaagattctgataaatttttgtggttttaccacaatcagcttcttagatagcaggcggattatgccgaaaaaaggcggacggaaatgacggcaatcgtcaatttccgcctttttccccccacgcctcttcgacggtctgaatcaatagccgattcagttcctccgttatgtcatgtttcggcgttttgatcgttttgacatagtgcccgattcgttctatttcttcttctataaatgcatgaatgatcgtatttctcggttccggagccagctcctgaccgctttttttccttgtaagcagtgtattgatttcagaaatgagcgcttcatccgtcaataaggaatcggccagtacgggaaatgacatcggcggtacggagccgaacgtttcaatccatctgcaggcaaggagaggacgcagaacataaaaatactttttaatcttcacttcactgccccgcaattccgttttttcattccgttttgccatattgagataatgatagatgccggcttcaggcgaaaaggcgcggattttcagttttcgaagcttttcagccgctgagaaagcttcataatagatcatctcagaagagagccattccaaaagaggcggatttgattttttaaaaagctgcagcgcttttctcagttcccagccgctgatgtcaagcatgtcatgaatcggctcttctatgacatccctatgcggttcgatcgaaaagtaccattcttttttcggcacatagagaaaccgtacatcatagtcgctgtcgcttgacggaaatccccatgcgcggctccctgattctacggcgtaaagcaccttgacgccgtgctgtgcttcaattcgttttaattcttcgatgatcctttgttccatctgtatccgtccttttccgtgatcattcctgaaaaaagcccgagtacttgggcttttcgctgtcgtcagcctttcagatgcgctttcagaaaggccagcttttccgtatggaaagaaggtatgtattcatgtccgaaataccggtaaaccttcaattctttttccgtttccagatgattgtacgcggcaaacaccgtcgacggcggggtcacgcggtcaatcagcccgatggacatgagcaccggaacttttacgcggtccgccagattcatgatatcaaaataggccagtgtattcatcgcggccttctccgtttcagggctgccgttctttctgaaaaaggagttaatctcaagatacggctcatcaagagcgacatcaatggcccgctcaaaattgcttaaataaggataatcggccgcaaccgctctcggaatgtcagatagtgccgccgcggcgattgaaagtccgcctccctggctcccgccgatgacggcgatcctcgtttcatccacttcatcaaagccgctgatgacttccaaagcccggacggcgtctaagtacacgccgcggtaataatatgtatctttatctaaaatccctttcgtcatccagccgggaacgtgtccgtgcggtgagacgcttgtatctgtgctgctgtgctggccgcggacaagcatgccgaacgcggcatatccgtgaagcgcccaatttacgatgtcatgtatatccccgtcatagctcgcattatagccgtgatatttcacgatggccggatgcggtccttgccggtcgggaacggcgtaccatccctcaatttccgccttgccgaagcttcggtatgtcagccggaatactttcacgccgtcagccgggtagctttcagcctttaattcaggctttgcctcttcctttgcaagctcatgtaatgatgatgcccaaaaatccgaaaagccatgaggagcggttttatttggtttataggtttgcagttggtcgagcggcaagtcgtataattgcatatccgattattctcctttgttttatatgttttaattttctgactctatcttaacacgattttacactcattttctaaacattttaataaacgtttgtttaaaaacaaaaaagccgtgcgctcacagcgtcacggctctttttacatcggctgatacaggtcccagccgatttttaacgtttctacgatataatcggctatttcttctggttccagattatccgtcgccacttttgaattatgtttatcatagatgctttggcgctcgttaaagagctgctgcatttcatccatggaacggttatgcagaacgggacggctttcaatcagcaggtcagcccgctgcttccaattctcccatgataaatcaagatggagcacgaggcagttttcaaggcagcactgtctgatttcctcttgtttaaacgaaccgcccccaagcgacacgatcttgaatttcgtattgcggcagatatctaatatatagtccttttcagtctgacggaaaaaggcttcaccttttttctcaaacatttcagggatggacatattgaaatctttctcaatctgcaaatcaatatcaataaagtctctgtataatttcttagcgaccagctggccgattgttgtctttccgacacccatgaatccgatcagtacgatatttctttctcttacgggaatggcacgttttgcgttcatcttcggcgaaatcctcctaagaaatgaaaaagttatgtttattatatgataactcaatattgaaatatagagataatgcaatgaaagaaaacccatcctttataagaagagatgagtttttctttctatcggagcttaatgcgttccacctttccgacaatgaaaatataagaaaatgccccgataaatgcgacagcgccgacaaacagaatcgctccgttatatgaaccggtcgcagaaacgataaacccgatgagaagcggggtgataatgccggccatattggcgaaaaagctaaagacgccccctgccaatccgattgtttcgcttggcgcgacctcactcagcatcgtccaggatatattggacatgccctgcgcaaaagaagcaatggataagatcgtcaaaaccgcaggagcagaatccgtaacattcgcgagcacgatggagcctgtcagcagaagaccgaggatgacgggcgttttccgggcaacgttcaccgacaccccccgtttcatcatgccgtcagaccaaaatccgccgaacaatacgccgaaaaaagcggcgatatacgggattgatgcggcgaagccgacttttaagaaagccatgtgctttgcctccgccagataagtcggaaaccatgtcaaaaagaagaacagcgtggaggctacggcgaattggccgatatacaatccgacaagcttgcggtattttagaagctggacgaaatccgcccacgatatcctgccggctgaatcagacacctcagtcagtccgccgccttctttaatataatcaagctcctcacgattcactttccgatacccgttcggctcgtgatacattttaaaccagaaaatggagaaaacaattccgagcacccctgaggaaataaatacggcgcgccagtcaaatgccgttaacacccagaataaaaccggtgtggcaaacgccagcccgacatattcccccgccgtataaacacccgtcgcaaaggcgcgttcccgccttggaaaccatgtcgtgacaatccggttgtttgccggaaacgccggcgattcagctatgccgatgagcaggcggcagccgaatagaaacccgaaacttgtcgcaaaagcttgtactccggtaaaaaccgaccacacaaataaagaaattccgtatgtccgttttgacccgaatttatccaaaatgagcccgcctggaatctgcatccccgtataggtccagctgaacgcagaaaaaacgatgcccaaaagcgcggggcttaggttcagcgaatgttgaatggatgggccgacaatagatacactggctcggtctatataattaatcgcagtgataaaaaacaaaagaaccaatatcacataacgagcgcgagtcggtttattgcggacgggactgaaggccctcagctccgtttcttttttcaatggcttctccccccttactcgaatgaaattaattgtacaacacttcggttaattatttaatactttgacgcaaaaaagcgttaaacaatttgtgtgccgcactgacctgatgcagacacaccccgcttataaaaaagtgtctgcccttttcacctgtttatccgtatcgcacccggggaaaaagtacacatatgatagacagttacgggaggattatcgatgaaactgagtttttgcacgacaggatgtaagaaaaagcatattttcgacatcatttctttcgcgaaggagcactcctttgagggaatcgaactgtggtacggacacgctaaacaatatatagaggaaatcggcccgctcgacaggctttatcagcagcttcaggaggaaggcatcggggtgcctgccgtcagtttgtacactgacttcgccgctcaggatgaaaggcaggcgttaaaggatgttcaaagggcattaagcgcggcacgacagctgcacagtcccttgatcagagtctttgccggcaatcttccttcgcaccggacgtcaccggaaaagtggcaacgtgcggttgatcaatttcagcaggcggcacggctcgcagatgactatgaagtcgatatcgggcttgagattcattacgatacgtacgcggatacaccggaggcggcgctggcatttttggaggatgtcggacatccgcgggtccgcaccatttttgacggctccaacctacacgtcaatcacgttgaccaaatgtccgctttggaaaaactgtatcataccgtcagccacattcatctgaaaaactatcactgggattttgccaactggtatctcagcaagccaactccgatttttcaaggagatatcgatcaaaaagcatttttaaaagagctgatgaacagacaatatgacggttttgtttctcttgagtattttggagaacatgcctttacgcatataaaggaatcgctccgcgaatatacgtctgttttttcccgctgactcttcgatcgaagggtctttttttgtatcatataaaaaaagggggatatcatgatgatcatttggataaatggggctttcggttccggaaaaacacaaacagcgtttgaactgcacagaagactgaaaccgtcttacatatatgatcctgaaaagatggggtttgcgatgcgttcgatgataccgccggatatcgctgaagatgactttcaaagctaccctctgtggcgggaattcaattacagcatgctttcctatttgtcagatacatatcagggcatcatcattgtgcccatgaccattacgaacgttcaatacttccatgacattatcagcaggctgagacaggatggccggaccattcaccactttaccctgctggcttcaaaggaaacattgctgaaacgcctgcgcaccagagcggaaggaaaaaactcctgggccgcaaaacaaatcgaccgctgcatcaacagcctgtctgatagcctcttcacagaacatctccatacagaccaaatgtctattcagcaggtcgcagaaacgatcgctgcccaagcaaatctgcctcttaagcctgattcgagaggcagccttcgaagattcaccgacagattgatggtgaagctgaatcatatccgtatcaaataaaaaaacgttttgaaaacatgttcctgatccatgcaaatggatcaataaataaaatcccctctgaagggatgtttttcaaattaagaaaaaaattttagaaataaagaaggaattttatggataatcatctaattattaacactgtaacacattttatttgaaaagggagtgctcgaaatgaatttcaaaaaagtgttaaccggttctgcgctgtctcttgccttactgatgtctgccgctcctgcctttgccgcatcaccaacagcatccgcatccgcggaaaatagcccaatctcaacgaaagcagatgccggcattaatgccatcaaactcgttcaaagccctaacggcaacttcgctgcttctttcgttttagatggaacaaaatggattttcaaaagcaaatactatgacagcagcaaagggtattgggtagggatttatgaaagtgtagataaataaaaatgaaataaacaaaaaacctccctttcaaaagggaggttttttttattctatttccaccaatcatcaaacatcgatgccggcacctggcgcttatgctccgtactgaggtagcgtttttccagcgcttcaatcacttcggaagaaacatccttgccttctaaataatcatcaatgtcattgtatgtgatgccgagttcggtctcatcagtctgctgcggtttttcatcaagcagatcggccgtcggtaatttcaaatacaggcgttccggcgcgccgagctcttctaataaacgtctgccctggcgtttcgttaatccggtcagcggcagcagatcagctccgccgtcaccgtatttcgtgaagaaaccggtcaccgcctcggccgcatggtcggttccgatgacaagcagcccctcttgtccgccgatggcatattgagcgatcattctcattctggcttttacatttcctttgttaaagtcagacagctgatcgcccgtgtcttttttatactgatcagcgaacgcgctgacagcggacttaatatcaaatgtccatgatttatcaggtttaatgaatttgagcgccaattgggcgtcatcctcatcttgctgtgtgccgtgcggaaggcggacggcgataaattcagcgtttccgccttcttctctgatgctttcagccgccaactgggcgaggcgtcccgcaagcgtggaatcctgccccccgctgatgccgagcacaaagcctttggcacctgtttttttcaaatattgtttcagaaagttcactctgtcctcaatttcttgtttcggatcaattgagggctttacatggagatcattcataatttgtttctggatgctcatcccaatcactcctcctgcattgtttctttatgatccatttcccgttcatgctgaaaatgaatcatgccactatgtacgactctctgttaaatatagcacaggtgcagattttaagtgaatcaaatacaccgggatcagctgatttccacccgcagcgccgtgatgctgtctccgttgcattttcctttttcaatcggacaggatgaaaacgcgacgacgagatccatttccgcacggagccgtacataatcacccgcgtcagaaagaggcgtttcgactgataagttccccttctcatcgagcaccgtgttcataaagatggcaaatgggtaatgcatatgcggccgcggcaccccgaacgcttcaagcgccccgctcatattgtcatagcacgtatcctggagctcgtctttatgctttccgtataaaagcctgttcatatccggacggcaggcgggaagcagcaggtcatgcttgccgactgtatcctcaatcagcgtcagcatcggcttgtataaattcgaataaatatgatcacccgtttttacatgaatggactggttggcatcaatcgtcgcgccctgatcaagatgttcataaaagtccttggcatgatacgccgtaaaatcagccacctgctgtccttccacatcgactacttttataatctgccctttgtgaaccttcaggccgagcccttttttcggcggtacaataaattgctgtgtcatcagactgctcctttttttcttctattatgaaccccggccgtttgtttcatgtaaagcaatttattggatgtatattccccttctgacggccgcaatctaagctttgataaaggggttgaacttcatgggtaaatcacaggaccagcctaaagggaatctcgcttggtggcagctctccttaatcggcgtcggctgcacaatcgggacgggattttttctcgggtccagcatcgctattgtcaaaagcggatattccgcgctgatctcatttcttattgccgggcttggcacctattttgtctttgagcagctcgcgaagctctcggccaaacagcccgaaaaggggtctttttgcgcttatgcgagaaaggctttcggcacttgggccggttttagcaacggatgggtgtactggtcgtccgaaatgctgatcactggaagccagctgacagcgatctcgctttttacgaagcattggtttccgaatgtgccgctgtggattttcgcctccatctatgcggtgctcggtctcttgattatatttacggggctgtccgtttttcaaaaaacggaaaatgtgctcgctgttgtcaagacggcggcgattgttatgtttatcgtcatcgccatattggcgctgtgcggtatattttctcataaaccggatgtgcaggtgccgaacgaatcaaaggatttgttcccgcacggagcgatggggttatggaccggattgatttatgcgttttacgccttcggaggaattgaagtcttggggctgatgaccgtgcatttgaaaaagccggaggaagcctcaaaatcaggccggctgatgcttgccgttcttgcggtgatttacgtcatttctctcggcctggcgctgctgttagtgccgctgggcaaattcaccgaacaggacagcccgtttattacatcgctgaagggttttcatttagatatcattcttgatatttttaacgggatttttattattgcgggattttccacgctcgtcgcctcgctgtttgccgtgacgacattgctttgtacgatggcagatgacggagatgcgccgaaatgcttcagattaaaggaaaacaaaaaaatctgctggcctgcgctcggattgacgtttgccggactcatcgtctccatcatcctgtcattggtgctgccgaaaaatatatatgaacacatgacgaccgcggcgggcctgatgcttctttatacgtggctgttcattttgttctcgggcaagaaactgctcgaaacgacaaagatgggaaccgtacagattgttatcgcccttgtgctgattgtcgcggccgtctccgggacgctgtttgagaaatcgagccggcccggttttctggtcagcctttgttttctcgccgtcattgcgatcgtgacatggatcgtacaaaaaaagcagggacacagccctgccggatcatagcttatttcgtcggtttaaacagtctcttcaaataagaaaagggacactttgacacttgcgtctcatcatcacggaggaaatattgcttccattctaaattgtcttttcctccgtaccaccccaatcggggatgaagaggggcttcatcatacgcctctaagcgttttctgatcagccggctcatgtttcgtccgaacgcggttgaatcatttaatccttcgaaaacccatctcggctgaaacgcgagcataaaaaacgggaagcttctgctttgtctcgcttcatgcgcaggcgtcgcgcacagaataaaatacggctcgccgtcaaagcagaactcccatttataatgttcagggtcttccggtatgtcttccggccagtctttcggatcgcagccgctcagccggtttaaaaaagaccagaacagctcttcatacgcctcaatggaataatactcagctaaatcctcaggcgtatcaaaaatcacaagcagcgacgcgtattttccggtattccttgagatctttccgtactcggacagcagtagtcccacttcctccggggttccctcttcgcggggatcacccgcaaaggatatccggagctgatctgtcaaaaatccctgacgtccgggaatgcacggaaacgcgtccgctttatcgcctactttttctgatagaagctcaaaagcgattctctgccaatttggcagatccaataacttttcctcaaggcaactttttgtgtacagctcgcttgccatcggcccacctccagtatcgtcatgatacgttatgatggagataggcgatgggtgactcttctatttatgagatgagcatttgaatcccctgccatccgaaataaaacccgaaaacgatcaaagacacacccgccgctcccgtcagccagcggagcgctttttcatgaaggagatttctgaaagtgctcgcggcgaccgccatgcagaaatcccagatcaaaatgccgagaagaatgccggagctgtaaatcaaaagctgatttgcatcgaaggattcagcggttttagcgaggatgctgccgtatatgccgagccagaataaaatgctcagcggattggaaagagaaataaaaaatcccgcgccgaatgttttgtaaaaagccggttttccttttccgcttctgacattcatggcttccctgatattttttagcgtttcgactcccgtataggtcagcacgaaaaaaccgaagagccacaaaaacgtttttacaaaaggagcggtcaaaaattgagacagcccgaaatagatcagaatcatatacagcccatccgcggccatggcgccaagaccgaaaatccatgcatgccaaaagccgtttttgatgcctttgtcaatttgcgccgcattgaccggtccgacaggtgctgacaatgacagcccgagaacgatgtagcttaaaaagatgttcattgacttccccctcattcatgcaacttgtacaagttattcatgaatgggccgtgctatgatatattattttaatttctcaagctcgtcttccatcatgtccgtcgcttttcctaaaaaatcgaatatcagccgcagttcttcttctttatattgtcggcaaaggctgatcgtagactgggataaggagctgaacaattgcttcacattcgcctttccggctgtcagcggcacgataatcacccgacgtttgtcttcggggtcttttttcctcatgacatatcccgctttttcgagccggtcaatgagcgccgttaccgaacctgtgctgagaccggtttttttcccaagctcgcctgcggtcatcgggcctgcttcatttaagatatcagctgattttaaatcggttggaaacagaccgagagattgagcggccgcctgatgaaacaggatcgtccttgtggccatctttcggaataactgtatcgcggtttcctccgtctcgcttctggtatttcttgttgacaactgacaggcctccctataaaatcaatttatcttgacgatcaagataattttcggcaaatctaatatgatcatagcaaatttaatgattaaaagtaagtatgggaggaaaaagcatggaacaaacagccgcgaaggacgcctcgacgaagtttgtcgtcatcggtcttttgctgggcattttaatgtcggctatggataatacaatcgttgccactgcgatgggaaatatcgtggcggacctcggaagtttcgataagttcgcgtgggtgacggcatcatacatggtagccgttatggccggtatgccgatttacggaaaactgtccgatatgtacggacgcaaacgtttctttttattcggtcttattcttttcttaatcggatccgcgttatgcggaatcgcccaaacaatggatcagctcatcatttaccgcgtcattcagggaatcggcggaggcgcgctgatgccgatcgccttcacgatcatttttgatttattcccgccggaaaaacgcggaaaaatgtcgggcatgttcggtgccgttttcggcctgtccagcgttctcgggccgcttttaggcgcgctcattaccgactccatcagctggcactgggtgttttacatcaacgtgccgatcggtattttatcattgttttttattcttcgttattataaagaatcccttgaacacaagaagcagaaaatcgactgggccggcgcaatcacgctggtggtttccattgtcggtctgatgttcgctcttgagctcggcggaaaaacatatgattggaactccgtgcagatcatcggtctgttcgctgtgttcgccgtgttctttatcgccttttttattgtggaaagaaaagcggaagaaccgattatctcattttggatgtttaaaaaccgtttatttgctacggcacagattctggcgttcctttacggagccacgttcgtcattttagcggtgtttatcccgatcttcgttcaggctgtgtacggaagcaccgcgacaagcgcgggctttattttgacgccgatgatgatcggctctgttatcggaagtatgatcggcggaattttccagacgaaagtgcggttccgcactttaatgctgatttccgtggtcgctttctttatcggaatgctgctgctttccaatatgacaccggatacggcgcgtacaatgctgacggtattcatgctgatctccggattcggtgtcggcttcaacttctcactgctgccggccgcgtccatgaacgatctggagccgcgttaccgcggaagcgccaactcaacaaactcgtttttgagatcattcggtatgacgctcggtgtgacgattttcggaaccatccagacgaatgtgtttaccaataagctcacagattcattcagcggcatgaaaggagcgggcggcgcgatgcagaacatcggaaatccgcaggagattttccaggccggcacgcgcgcccatattccgccgcacattctggatcgcattattgacgccatgtcgcaaagcatcacatatgtatttacgcttgcgctggcgccgatcgtcattgcggccgttaccattttgtttatgggaaaagcgagagtaaaaacctctcaggaaatggcgaaaaaagcgaattaaaaaaagcagtacatggcgtttgtcatgtactgcttttttgtttactctgcgaaatgcggagcgagaatatctttcagcacgtttgcgctgcggctgaattgagcctgttctgtttcattcagctcaagttccgtcacacctgcgatgccgttccgattgacgacggccggaacgccgataaagacgtcgtttacaccgtattggccgtccagatatgtgctgacggttaaaatgctgttttcattacgcaaaatcgcttttgtgatgcgggcgaggctcatcgcgactccgtaatatgtcgcgccttttttctcgataatatggtaggccgcgtttttcacatcgtcaacgatctgatccagctcgtcctgtttgtaagctgcatttttctccagcaattgctgcaccggcactccgccgatattggcgtgactccatacaggaagctcggtatcgccatgctcgccgataatgtgggcgtgtacgttttgcggagcggctccgaagtattcgctcagcatataacggaatcgcgcagaatccagtgtcgtgccgcttccgatgacgcgttctttcggcagcccgctgaatgtccatgtcgcataagtgagaatgtcgaccgggtttgtggcaacgaggaagatgccgtcaaatccgcttgccattacttcaccgacaatgcttttaaaaatggcgagatttttttcgaccagctcaagtctcgtttcacccggtttttgattggctcctgcacagatgcacacgatatcggcatccttacaatcctcatatgtgccgtaagacgttttgaccggatgaggcgcaaatgctcttccgtgatttaaatccatgacatctcccatggctttttctctatttacatcaatgatcacaagctcatctgtgatcccttggttaattaacgcaaatgcataactgcttccaacaaaacctgctccgattaatgctactttgttcactcgttcgttcatcatgtatgctcatcctccagtgtttcgtggtgtctgtttttatcttgtgaagtatttcacatttatattgtgcaacacttcacaaacttttgcaagagaaaagtttgatttttgaacaaaaaaatatcggtgatggtttccagattgttgacaacatcctaaaacggaaccgttttaggatgttgtcatcttttcagcgtgattgaagacgcgctgtccctttcccagaagcgggggtttgccggcacgctgatgtgatgatggccctatccattaatgcggaagataaccattcaaaccggagttgttatacaaaccattctgcacataatcaaagccgggctggttctgtccgggcacttgggcgctgccattgttaaaaatcactttggcattggccgtatccgtattcgcaggcagcgtcagcgtgtacattccatttgcattcttagtcattgctttccccggccacgatccggttaattctatggccctgcctccatcatgtttatagatataagcatttacctggccccaatggtccgggttttgatagccaatgatgttggtttgggacgggtcttttttgacaaatgtgtattcttgggttctcgctggaccctcgccgttcgttccggttaatttgatgttgtatgtcgtgccgattggatctcctttcccgatcgttagtcggtctccatccttaaatgctgtctgctgcccattattgatttggtaaacggcttttgttgttttcgcatttgcacgcagggtgaccgtcagctgatcattgaaagaatggactgcccccgtttggtaattctcaagaaagacatgaggcgtatttccaatatcatcaggataaagaacagccgccgatctggcattgatcgtacctgtcagtttgccgttcgctacttgaaatgaaccggcgccggccctattatcatacctgccgtcaggtaatttcgctgaagtattgatggtgacagaagaggatcctgcatttgccagcacaacgccttttgagccgcgctgattcataaagatttggttgttcccattcggattcgagagttcctcaggctgcccggccattacattgtgaaatgtattgaccgcagtaatcgcctgatctttaaataaggcgctcccgcgatctcctatttgactttttccgggaaatcttacaccatttcctccgccctcaggtctggaaaagaaaagaggcgtgcttcctgagcgggaaccaatcactgcccagcctaaacgaatatcgtcatcactcatccatgtggactcttcatcatcattggcatacgtatcatgtgattccacccatgtgactaacttgtccgcagacacgtcagatgcataacgggagatattcgacacactcagattacggttctttaaagcggatctgatggaatgcccgtagttagaagccgtcacattcatataattcgcataagcagtatctctggacgcgctgtcttgcaggatttctccgtattggaactccgccgatgtatttgtgatattcggccaaaactggctgccgtaattcccatcatccggaagctctatatgcttggcggcatcatagcggaatccgtctgctccgtcattcaatgctctttccaagaaacgtttcagataggcctgcacctcagtattctgtgtattccaatcatacagcccaagcaaggaattttgagtgacgtcccatcgatccgaccaatttttaatttgtgtgtttccatgggtccagtttggaatacgcttaatctcgtcagaaatcgcgccataatcgctggtagtatgattgataaccgcatcgacaatgacttttacgccatacttttccgcggctgcacacatgtccttaaattcttgttcagtgcctaagtaacggttgccgatttggtacgatgtcggctgatacagccagtaccagttcctcatgcttttatctccttggttcccttcctttacttggttaatcggagacgtctgaatggctgcatagcccgcatcacgaatatctttcatattttgtgttaacgtattgaacgaccaattccatgcatgaaggatggtcccgtttttgaccgatgacgcggtcaccttattcgatttgtttgcagtttcagcgtttgcagccgccgggcctgacaaaaccaaatgaaacagcaataaaaatccggcgaataacggcagtaaagaggttttgaatcgtttttcaaacatttttgacactccttatttcatttttgaagactgactgcggagtcaaaaattcctcttactctttcttcagctcctttcaactgttgtgaagactggataattttgttaacgcttacatttcaacttatcacactctctctatcaaagcaacgtggcagagtgaattcaaatctatattcctatcaattaaaaagacttcccgctttcaaacaaaaaaagaaaccacctgtcaagatgatttcttttttatttcttttatcgctcttctgtaagacagcttcacaatgacataccgaagcagaaacagaatgcctccgcagacgataaaaagaaagatcattttcagccaagcaaagaatgtatggggaaaccccctgtcgtacatcgtaatcgccgctaccgcaaaagtgaccgcaattgaatctatccgctgctgcttcacccgcttttgcagttcttctttggtgtctattctcggcatgagcattcccgacgctcccgccctgatgcaataataaacaattataatgaagaaaaccgccaagctaccggcccattccctaaacggacagttcagaacaagtccgcgtacgatgatgtcaagcaaagacagtgtgcccacaagcattccgacttctgaccaaatcattcgttctttctctttcacactctcactctttccattcacgtttgaaagtctgttccgacgctgattcatgacttcctcccgtactattaagaatggcttacaactcccattatatcttgccgattcataatgataaaccgaaatatcattgacaaaaatgttaataagggccccaattgatcaggacgcctatgcagataaacacgagaccgatgacaaaccaaatcagcgccagcggaatcatgaagcgaagccactttacgtacggaatgccgctggcagccagtacggccatcagcacgccggaagtcggattgacacagtttacgacgccttctccgagcatgaccgcttcaaccgcgacctgtctcgtgatgcccatcagatcggcaagcggcgccaagatcggaataaatacgaccgcctcccctgagcccgatgaaatcagaaaatgaagcagggcgctggaaatatacattccgattgcgcctgccatagggctgaaaccgtccagcagtgacgcaagtccattgactaccgtatcaagcagctttccatgttccaggataacggaaatgcttctcgccattccgacgatcagcgcaccgtaaacgagcccctgacagcctgtaataaacgtttttgcgatatcatttgccgccattcccgcaatcagtccggacacgattgagataaaaatgaacacggcggccatctctgaatcagaccagccaagagtaagcgcgccgtataaaaagccggcaagcgacaaagccgcaacagccagaatcaatttatggcggacggtaaacgggacatgcttgtcctccggctcagaaacctgcgggagtgaacctgccgccggaaaccaatcgttccccagcagactggcgtcctttgcttttctgagttttctcgtataccgataaatatataaaatagatgataacagaaaacaaatgtagacggcaatccgcaggccgataccggaaaacagcggcagctccgcgatgctttgtgataacccgagcggtgaaggtgataaaatcgtcgcgttaaacccggcatagcagccgatataaatgacggccgccccggccacggcgtcccatttcagcgagcgggcgacgatcaggccgatcggaataaaaccgatcacggaattaacgacgatgccggttgtgccgaggatcgaaaatagagagccgacaatcgcaataaacagcagctgttttgtgcggaacgtactgatgacattactgatcaatccattgatggcgcccgttttctccaaaatcgcaatggtgccgcccgtaaacaggattaaaaaaataatcggcgcggaacttgtcatcccttcctgaatcgcggtaaaaaaagcgatcgggctgacaggagactggtctaaagaatgatagcttcccgggacggcggacgtcacactgccctttgtcactctgtcaaattcccctgcgggaacgatgtacgacgctatcgcgcatagtaaagcgacaatgaacagcagcacataagcatcaggcatcacaaacaatttcttctttttcaatacaggttcggccttcggcacagccataacatcaccatcccgctttaaatttataaactattcagaaaatacagatatgtgctatattatatacagaccgattgcctgttttcaatatcaaaaataaaaaacagacagcttttgaaggaggacttacggcatgaacagactcacagcgcatgaaaagcaagtcattatggatatttttgaccacctgcacgccaatcccgaagtaagctggaaagaatatcaaacaactgaatatctgactgaaaaactgaaagaggccggctgccggacccgcacgtttgatgattgtaccggtgttgtcggcgaaatcggagaaggctcgccggttgtggctgtccgggcggatattgacgcgctgtggcaggaagtggacggtgtctttcaggcgaaccattcatgcggacatgattcacatatgacgatggcgctcggcacgatgatgcttttaaagagtcagccgaaacttccgaagggcaccatccgctttatttttcagccagctgaagaaaaaggcggcggagcgctgaaaatgattgaaaaaggcgtactggatgatgttgatttcttatacggcgtgcacgtgcgccccgtacaggaaacggcaaacggccgatgcgcaccgtccattctgcatggctcaagccagcatatagaaggcctgattatcggagaagaagcccacggcgcgagaccgcatctcggccttaacagtatcgaaatcgccgcccttctcgtccaaaaactcagcttcattcatcttgatcccggcatcccgcattccgtgaagatgacaaagcttcaggcaggcggtgagagttccaatatcattccgggaaaagcatcgttcagccttgacctccgcgcacaaaccaatgccgccatggagaaattaaccgccgaaaccgaaagagcctgtgaggcggcggctgccgcattcggcgcaaaaatcgaactgcaaaaagaacacagcctcccggcagccgagcgaaacaaagaggcggaatccatcatggcatctgcgataagcggcattctcggagaagaacatgtggatgaacctcttgtgacaaccggaggagaggattttcacttttacgggttaaaggtgccaaacttgaaaacgacgatgctcggcctaggatgcggtctgcagccggggcttcaccatccccaaatgacatttgaccgaagcgccatctttacaggcgttgagatattaacggctgccgtcctcaaatcgtttgaagcataaaaaaagcagcccgttacagggctgcttttcttcgttatttcttcaaatcttcaattgaattgacgtttttcatatactgaggaacgaccagacccatcttgacgcctgtcagactcgttcctacatcttcatatttgcctttatatttagacgcatatgccttatgggtattcggaagccaagcagacaatgacgcatccgcgctgcctgtcgcaatcgcagtccacatcggtccggcctccacttgcgtcagcttcacgtcatagccgaggtcttgaaatacttttccgatcacgttcgtacttgcgatttcactgtcccaagccacatatgccaggttaattttatcccctttgactttatgggcgccttttgtccattgagccacttggtctttgtgttttttcacatattcagcagcggctttggccggcttttcgccttcttcaacggcaatcatgacttctcccatatcgtcctgcgtccatttgaactggctgagaactttggccgcgttaggctgttccttactgaagccggttcttgtaatcgtatgaatctgctcggcagttccgtacgtttttttcggatcatcaaggaacttcagcttgtatctggagaacatccagtgcggcgtccagcccgttacgatgatcggctttttccggtcatatgatttcttcaatgtcgccgtcatggcagcacttgacgccgtgacgacattccagtctttcaatccgtaatccttcacggcctcatccgtcagggccatgatccccgatcccggatcaataccgataatggttttgttcacctggtccgcagccgttgccttaccatcagtctgcgaaccgcaggcagccaaagaaagagccagcgcagcggtaacgccgacaccgatgattttcttaagcatcaggcattccccctgctcttcttcttcactttaatgttttgcgtgatacggtcgagtgtaatcgctacgatgacgatcgcgatacccgcttccactccgacaccggttttcaactgtgtcacggcgctgtatacttcagaaccgaggcccggcgcaccgaccatggccgcgataacgaccattgacaaagcaagcatgatgctttggttaataccggcaagaattgtttttgtggcaagcggaagctgcaccttgaacagacgctgagacgtcgttgaaccgaatgcttccgtcgcttcgatcaaatcagccggaacttgtttaataccgagaaccgtcatgcggatcgtcggaggcatcgcgaaaataacagatgccacgacgcctggcacaaccccgatattaaagaagaaaattgcaggcagcagatatacgaaagccggcatggtctgcattaaatccagaatcggtgtaacaatgcggcggaccgtttctttctgagacgcccatatgccgatcggaaccccgataataatggaaatcaaaacagatgtgacgacaagcgccaacgtttgcagcatcggcgaccaatagcccaaataatcaataacaaggaatccgattaacgtaaagagtgcaattcctctcgtactgatccaccaagcgagagctgcaaaaataacagtcaataaaatagacgggatgaaacccaaaccgctcacaatcgcgtttacgaaagcggccaaaccgtttgagattccgtcaaagaaacctccgaacgtcatggtaagccagtcaacaaaccggtcaacgatatctgctaacggaattctaggcaatctgtccatttacttcaccccctgaacagaagaatcctgagcttgttcagcagaatcttcaacatttatataatcgttatttcctgaaagcgcgccgattaatgcgccttttacgacaatgcctttcatgcggtctttatcgtccgtgacggcgatcggaatattcgcatcagacacgacatcgaaaatctccgtcaagtacgtgctttcgtttacagtcgtaaattcagtatttagaatatcctgaagcgataagtcggattccaccgcttttttcgcatccgccgcgtgaatgacgccgagaagctgtttctgtttatcaacggcgtaaatagaagaaataccgagattcttcatgagctgcagcgctacacgaggccctttgtcaatccgcacggtttcagcgcgcttcatgatgtggcccgctgtcagaactttggataaatcaacgtcctcaacgaatttctcaacgtattcattggacgggctcatcagaatttcttcaggcgtcccgatctgaacgatgttaccgtctttcatcagcacgattctgtcgccgatgcgcaatgcttcatcaagatcatgcgtgataaagatgatcgtcttgccgacagagtcatgaaggtctaaaagctcatcctgcatgtctttgcggatcagcggatcaagcgcactgaaagcttcatccatcagaagaatgtcaggatcattcgtcaatgcgcgcgcaagtccgacacgctgctgcattcctccgctgagctgatctgggaattggtgttcaaagccttcaagaccgacaagtttaagcgaatcaagcgctttttgctcacgctcttttttgtcgacgccttgaagctccaggccgtattccgtattttcaagaatcgttctgtgcggaaacagtgcaaatttttgaaagaccatgctgatttttttccggcgcacttcccggagctggtcttttgacatatttgttatcatgtcaccatcaatataaatattcccggcagtcggttcaataagccggtttaacagccgaactaaagttgatttaccgctccccgatagacccatgatgacaaatatctccccatcatatacatcaaagtttgcttgattgacaccaacggttgatccggtcgctttcaggatctcttttttgttttttccgctggacagcatctgaatggctttttttgtctgttttccgaaaaccttagatacattttcgacttttatcttaattggtttctcatccaaattcatattttccctccataataagcaatctttaataccgtaacacgtttgtaataagtcaaacaaacatcataatcccgtttattttgtatcattactttaaaaacatccctgtgtcttattttcctctggtatgcttctaaatactctctaatcctccttattgaggataaattataaaggaaatcgggcttttatcaggcttgagaacgtttccatcgaatgtgctgcaaactgatttcctatcctttttttacaaaaacaagaattttttcgcgacattgtcccggaaaaagaagttttctcctcctaaaaataaggaatattaaggagaaatataggtctgtcaacagacagctcactaaaaaaagcaccccaaaagggtgctcattgcgcaagctctgtctgtttcgtttcttttccgagaataataatggtgatgacggcaatcaggatggccgcacaaaagacggcgaaaatcactgtaaacgaaacgttccgggctgcaagcgatccgacgagaagcggaccgaaaatgccgccgattctgccgacggccgccgttgtgccggaaccggtcgcacggatcgccgcagggtactgctccggtgtataggcgtaaagcacgccccatgcgccgagattgaagaaggacagcagcatgcccgctgtgagcagcatggccaatgaatccgcggcaccgaagaaataagcgctgcccgccgttccgagcaaatagaagactaagatggtcttcctccccgctttttcgatcagccacgccgcagagaaatatccgggaagctgggcaagtgtcatcagaaggacgtattcgaagctctcaatcatgctgtagcctttcatcagcatcacgctcggcagccataaaaacatgccgtaataagaaaagacgacgcagaaccaaacgacagacagcagcaccgtcggccggatatacggtttcgtccagacacttcccgcctgcccgcgtatgctttttttctgcggcaatgcctgatgcgccggtgattccggaaggcttttccgcaagtacagcgcataaaatgcggccagcgccgttaagagcagcgcggcctgccagccgaatgacggtatgacaaagtaggaaatcaccgccgcaagaagccagcccgcggcccaaaagctctcaagcagcacgatgatccgtccccgcttttcgggaggggacgcttctgacacgagcgtcgaggcgacaggcagttccccgccaagccccattccgatcagaaaacgcaatatgagaaaaaccgtcaatcccgttgcgaaagcggatatgccgcttccgacagaaaagaataacagcgtgatcataaacacttttttccggccgatcctgtcggccagcattccgaatacaaaggcgcccgctgccataccgatggaattgacgcttccgatccatttcatttgatcgggtgttaaattccaatcagtgtgaagcgcggcgataataaacgataaaattccgacatccatcgcatcaaacagccagcccattccggcaatcgccagaagttttcgcggagtgacggcaggttgtttgttcataagcagcacctcaaatcgaaaatgattaccgtataagtttacacctgtctttacacattgtcattatcttttttcgcaaaaaaatcccgcttgccgtaagcaagcggggtgtgtgttaattctttaagactgcgtttttaatattatcctgaagctgttgaatccgtttcgcgccgtcttctctgatacgtctgttctcttcttcgatctgtttcgtttcctgcataccgctgacaatcgtattccaagacgtttcaatcgtctcaatgtcaatgctcggacggcctgccatacgggcaatctccacgctttggtttgaaatattttcagcgtttcgcttcagcatttcattcgtgcggcggtccagctcgctcattgaatcagccacaagcttttgccgtttgactgtgacagcctgaatgatgccgtttttgaaaatcggaatcgtaatgacgaaagcggaattgattttcccgatgagcttcgtatttccgcgctgaaggaggcggatctgcggcgccgtttgcagcgccaccatccgcgccatatctaaatcatagacacgttcctcaagcgcctgaagcccgtcacgcagcgtatcaagctgcatttgcgcaagctggtttccgcctgccgctttttcttcataagaaggaatgagcgcctgcatttcctcaagcttcatctgcccggcaacgacatatttttcaagctccatgtagtagttaatgttgttttcatacatctcttcaagcgtatggttcgtctttgccatttcatctttgtattttgaaatttcgacgtggattttttcaatttctccgcccagggtgcggtacttttgaaaaatcttttcaatcatactgttgccgcgtttgaacattttagcgagaaatccttttggttcatcgaaatcatttttgtcaaaacggtccatgatttttccgagctgcgtcagcattgtgcctgaatccgtgacacttgttgttttcatcatatttaagatgcggtcggagaacttcgagatttcaactgccggttcttttccgtactcaagcagctccatttggtttttcacgtcaatctgctgcgaaatgcgctgcacctcagggtcttggcgcagctgcaccctgatgtcatctgctttttgttcagaaatctcttcatttttatcaagaacaagcggattttgattttctgtcatgactatttactctccctgcttttgcgtaatggttctaaacagctttcttacgagtgacggctccttatattcctgccgaaacaccatgtcctccagccaatggacatcaaattggctttcttcaatataatgctcaatgtcctgatggcccggcggattatacaagatgatatcgacgccgaatttatttaaaaacaacagagcggcggcgtcagaacgtgtaagttcgccattttgttccgtatgatataaaacgagtttcggaacggtttgggcgtaatcaaacgtctgaatcaattgcagcagcgaagcgggcaggttcgtcgcctggcggaacaaatagattgcggcatcccttgcctgctccccgggcaaagccttcagccctgggtttctgcacatgtcagaaatcacattggcgatggcgttctgcacgcctgacgggagatgcttgtactgccagatgttgcttcttttcagcctgtccgcgtcaatcgctccttcttcgttcaaaacctgactgtagtgatactggtagttggctttcagctcttccgtaaacggaaaactgcggatcatgtgtgtctcctgatagtctgcggcggtatggagtctgttccaatattctttcgtatctttggaaacccccatcactttcgcaaaaaggttcggaacggccacccgctccctgtccgctttaaattgcggccggataaacgcccgctccttcgcaatgagaaataactcatcatacgtcgtttttaatgtcacggactgcggggtatgatccctgaactgccaaggcttatacatcatagattcctcatggttcagcacatgctcaatttctttcgttgaccggtaggccgtcgtggacgttctgtccggcttttctttcgggaatggctcaaggccgcctgttgcggggagctttatcacaaagctgagttcctcatccggatcaatcaagctgaacggatcttccgcagccggatgaaacaataggacgtcacagccgatcagcatgagataatagagaaaatagagctggcttttggcagcgtctccataccacaccaccttcggcatctcacgctctatatcggcttgttcaagccatggattcaggtggttcagcgaaaactttgacacatccaagagcacacgccggaaatcgggatgattcagcccgttttcatgccggtccgcaaaggtttccaaaagcgtcataaacgcggttctcagccggcggtgcataagcggatcagcgtgtttggcaagcagcctgcccccatcgagaaacgcgacaaacctggaaaccgaaagccctttctctttttgattgaccgaatggatgtgctgcagcgcctgaaacgtttcaggcgcgatggtcttatccagcgtctcgcttaacacatggatgttttcgtgagaagacagctcgaaaagcttattgtaatactccgtctcatcataaggagtgcccaaaatccggacggcaagacgggtaaacgccagcccgttttcccgctcgtaaccgggacgttccggcagcggccgcatcagaaacgtttcccagtcatcgttttccggctcggcctttcggatcaccaattcttcctgcctcatcattttcctcctttctcttcatgatgatcggtacaaaaaaggaaggaaatgaactctccctccttttttgttttattcttctttagatgcagccgtttgctcctgaacctgcttttgtttgttgaaatagtggataataaacgttaccacaaacgcagcgatgatgattccgaagaacaccacgtgcggcatttcataatcaaaggcgctcgccgccattttcacggcgataatcccgatcagcacaaaagccgtattttcaagctcagggattttatcaattaaaacaaggaatacttttgcgactgtacgcatcatgagaatgccaagcataccgccgatcaagagcacccacactttttccgataccgcaaacgcggccagaatgctgtcaacagagaaggccaaatccattaactcaactgaaacgacagtggcccagaaaattccgaacgtacggaccatccatgaatttttcttcatgccttccgtatcgtcatcaccttctccgatccagaaatgcttaatgacgagccaagccaggtacagcgcgccaagcactttaatccaccagaacttaatgagcagcattccgatcccgataaagataaaacggaaaatatatgccccgaacaatccgtatgttaatgctttcttccgctgtttttcaggcagatgccttaccatcaccgcaagcactaacgcattgtcggccgacagcagcccttccagcagaaccaaggaaccgatcagcccccatgatacagggtcagtcagcacctcaccccacattttccaatcaaaaaaggaagcgtaggtcgacataatatgatgtagaaaatccaagttttttcctcctatttagtaaaacggtaatttcctgcttacacctgcaagccgtaattccggcaaagtgatgccagaccgccggaaaacccgctgccgatggcgttaaacttccactcagccccatggcggtaaagctcacaaacgacaaccgccgtttcaatcgagaagtcttcccctaaatcgaaacgaagcagttcattctggctgttttcatcgacgacgcgcacgaacgcgttcgaaacttgtccgaaattttggccgcgcgcttccgcatcatgaatcgtgacggtgatgccgatcttttcaatatttgcgggtatttttgagaagtcgacgataatttgttcatcgtctccctcgccctcgcccgtccggttgtctcccgtatggatgacgcccccgctcgggtgttccaggttattgtagaaaacaaaatcaagatcatttacacagttgtcatgggcatcgacaagaaaagccgacgcgtcaaggtcaaagtcatgccctccggagtacttgttcgtatcccaccctaagccgatcaccgcttttgtaaggccggggttcgtttttgtcagatcaacacgctgtcctttcgccaattgaatagccatgtgccgtctctcccttctgtgtttgatatggttcagccgatttgcaggccgtaatctgtcgcaatacgggccagtccgccttggtagcctgagccgatcgcggaaaatttccattcgccgttatgtctgtaaagctcccctgcgataatggctgtttcaattgagaaatcttcagccagatcatagcggatcagctcctcatttgtctcttcattgacaatgcgcacgaacgcgttggaaacttgtccgaagttttggccgcgcgcttccgcttcatgaatcgtgatgacgaatgaaattttgtcaatagccgcgggcaccgcgctcaggttgactcttacgctttcgtcatcgccttcgccctggcctgtcaggttgtcgcctgaatgtgcgacagagccgtttccgccttcaagctgattatagaaaatgaaatcatcaggcgacgcgcattttcccgcttcatttaatagaaagacgctggaatctaaatcaaaatcatgtccgccgtcgtatttgtttgtatcccagccaaggccgacaacgactttagaaagacccggatttgttttagtcaaatctactttttgtccttttgccaatgaaattgccatgtgtgcactctcctttttatcgtttaggcgtatcggttaacgatatcgccgatttttgtatcgtttgtgccttctcctactgcggcgaatttccactcgccgtcctggcggtagatttcagccgcgatcaggctcgttctgcctgaatagttatctcttaaattgtaagtcaccagttcttcgcgattagcctgatcaacgacgcggatgaacgcgttttgaatcatgccgaagtcctgttttcgtctgacgcagtcgtaaatattgacgacaaacacaagtttattaatctgagcgggcaccttcgccaaatcgatgagaatttgttcatcatcgccgtcgccttcacccgtcaggttgtcacccgtatgtacgacaccgccgcaccggcttttcagattgccgaaatagatgacgtttttgctgtctgtcattttatcattttcaagcatcagtacggaagcgtcacagtcgatattggcaccgcctccgccgaacagctttccgaaaaagcccccggatgatacagggtcccagccgagtccgaccagcagttttgacaggccggcttttccttttgttaaatcaatccgctgtcctttttgtaaagagatcgccatatgattcactcctattctgtaagggtgccgctaagcacgccgcaagtgcgcatttttactaaattccgggacaagaatcccggtgtttattaagatatacgtcttttattatatcaaagtttcataaaacataagaatttttggcgaaaaacggcgaaaaattacttcctatattctccttcgttccggagagaatagagaaaacaaagaaattgacgaagactgaacatttttcctatccttgtatcaatacatgtcagtaaaggagcagacgagtgattgatttaagcatacttgatcaggcgcccgtatccaaaggaaacgggccgcacgagacgctccgccgttcagcggagctcgcccgtctcagtgaaggatggggctataagcggtactggtttgccgagcatcacggcacaagagggctcgcaagcgtttcgccggaaattatgatcgctcataccgccgcagccacaacgtccatccgtgtcggatcaggcggcgtgctgctgccgcagtacagcccctataaagtcgcggaaactttccgtcagcttgaggcgctgcacccgaaccggattgaccttggggtcggacgctcaccgggcggcacgacgaaaatccggctcgccctcacagacggggtaaagaaaagcatgaccgagtttaacaggcagcttcaggatttatcatcctttctgacagattcggttccctcggaccatgcttatgcaggaataaaaacagcgcctttgattgaaacagccccgcagctttgggtgctcggcctcggggaaaacagcgccagacgcgccgctcttcaaggtgcgggctatgtcttcggccatttcattaatccggaacgcggggaaaaagcttttcagatctatcgggaccatttccgggcctccgcccatttttccgctcccgcctcgctctgtgccattttcgtcatatgcgcggctacggatgagaaagcggaagaactcgccttaagccaggatttatggcttcttcgtgtcggaaaaggcgccgacagccgcgtgccgagtgtggaggaagcgaaagcttatccgtattcgccggaggaccgtaaacagatagaagaaaacaggaagcggatggtgatcggctctcctgccgcagtgaaacgccgtctgcttgaactttccgagcggtatcagacaaaagagatgatggtgctgtgcaacgtctttgatttcgaagcaaaaaaagagtcatatgagcgtcttgctgatatatttctgtgaaaaaaagccgtcaaacggagcagcagatgagactgctgcaccgcttaacggcggttttttcgttcttttccttttttaaacgcattccaaatcccctgcagcgtaaacccgagcagaagcagaatgattaacagtaaagtgattgacggccccggaggcgttccgagctggtacgaagacgtcagccccatgaacacactgaaaagagaaataataatggctgccgcaaacacccatttaaaccctttggcgatacggattgcaaaagccgcgggcagtacgaggagcgcggaaacgagcagcacgccgataatcggaataatgaccgaaatcgccagccccgtcacgatgctgaatgacattgacagcaggtttgtgttaatgcctgatgtcttcgccgtcgcctcgtcaaaagtaagcagatagagcggtctgtttaatataatgaaataaagcagaatcagcagggtaatgcctccgataatatagacctgctgctggctgaccgtgacaagcgatccaaataaatattgatcgatgctcatcgacgcgccgccttttgacagactgatcagaaacatcgcaaacgacagcccggccgccattaagattgcgatagatacctcggaatatgtacggtacgcccgccgcatgtattcaatgccgatcgctccgatcgtgacgacaacgatgctcgccgccgtaatattggtactgagaaaaaaaccgatggccacgcccgacaatgaaatatgagacagcgtatccgccatcagcgcctgtcttctcagcacgagatatacgcctaatatcggcgccataattccgatcatgcttcccgctagaaaagctcgtcgcatgaattccaagtcaaacatttccatccgcctttttcccccctttcaagccgtatgactttatccagatactgctgtacttcgttttgttcgtgtgtcaccatgacgacggtgcggttgtgatttttcacctgatggtgcataaattcgtagaaaccctgtctgctttcataatcaaccgcggttgtcggctcatcaagcatcagcagatccggattgctcgcaagcattctcgcaatgcagattttctgcttctgtccgccggataaatcgccgattttccggtggcggaaatcccacatttccaccatcttcagcgcgttttccacctcgtggtgatccgtttcgttcaatcgtttaaaccattttcctttcgtataacggcctgattgcacaagctccagaaccgtgcttgggaatcctgcgttaaatgaagaaatctgctgcggaacatagccgattgtcaggcgttttccagctgcgttttttttactgatctcggccgttccttcccaaggtctgagcatgccgagcatgactttcatcagcgtcgattttgacgcgccgttcggccctgtaatgccgacgaattcgccgcttttaatttccagcgacacgccgtcaagcaccggtgtatgcgaataaccaaaaacgatatcctgtaatgtaacgagattcatgctgaccttcctttcccgcatagaaatagtgtgcaccccgcggcgcacactatgttatttaaccaatagcgaatctttcagtgcatcaaggtttttctccataatgtcgatataaccgatgcctttatcccgttctttttggcttaaaccttccagtgtattgagcacttccgttttcgcgccgatttcaccggcaagtgtatctgcaactttaggcgatgcaacttcttcaaagtagatgatcttcacatcatgctgtttggcaaacgttttgagatccgccagtttggccgcactcggctcttcttcaggagaaaggcctgcaatcgcgacttgttttaagccgtattctttggcgagatagctgaatgccgcgtgctgtgtgatcagttcttttttcgccgctttatttaatgttgtacggtatagtttatcaagatcctgcagttttgcaatatattctgtactatttttctcatagtatgctttattcttcgggtcctgttttacgatctgcgccgtaatggttttgacctctttttgcgcaagaaccgggctgagccacacgtgagggtccatgctgtggctgtggtcatgaccgccgtgtccatgttcctcttcctcttcatccgaaccttcgagtaagtcaattccttttgacgcctttacaaacttcgcatgatcagagctcatgcttttttccgctgaaggaacccatgtctccatatattcgctgttgtatacgaaaagatcggcgttttgaatgccggcgatatccttcggcgtcggctcccaatcatggggttcgaccgaagacgggatgagaatgtctacatcgcctttgtctttgacaatttgtttcgtgaattcgtacataggataaaaggtcgtcacgacgtgcagtttgccgcttttcgaagaacctgacgaaccttttgaagatgaattgccgcagcccgccgcgattaaaaagcatgccgcaatgacaatgattccgctccattttttaaacaagccgtttccccctgttctgtaaatcagaatgatgacgatttccaaagcgttctttctcgttcatttgttacctataccataataaaacgaagtaattacgttttgcaagatatttttttctaaattaatatccaatttacctaaaaaaccccgccatgtatggacgggggagtcctatcacatatcaggcaagcagataaactcttgtttcgtatgggcggaatgtgatgcgggattccgtgccgccgtcattatcatagttgctgagaagcagctcggccctttcaggttcggaaccgtccggccaataaaaagcggcttcttctttcgatacgttgctgatggacatgagtttttgtccgtttgcctgtctttcatacacgaacagctgcgggtcatcaggaagcagcagcttgtagctgccttttatgatatcagcatactgttttcgcaggcggatcagttttttgtaaaagttcaatatagaatcgggatcatcctgagcctcggccgcattgacggttttgtaattgggattgaccgcgagccacggttcgccctccgtaaatccggcattcttgctgccgtcccactgcatcggtgtacgggcatgatcccggcttttcgccataatggacgccatgacttctcccctgttgcggcccatttcaaatacccttttatgatacatattgacggtctgaatatcttgataatcctctattctgtcaaacggagcgtttgtcatgccgatttcttccccctggtaaatgtacggcgtgcctttcatgaaataaagcagggcggcaagcattttggcggatgctttgcggtatgtgccttcgtctccgaaacgggatacgatccgaggctggtcatgattgcaccaatacagcgtgttccagcctcgatgttccagtttttcctgccagtctgtgagcaccttcttcaaatcggacagctcaagcggttttacatcccaatgctcttggcccggcttttgatcaagctccatatgctgaaaatgaaaaatcatattcagttcatgctcatcggttcccgtgtagaccagcccctcctcaggcgtcactgatccggcctcgccgaccgacatcacgtcatatttggaaaacacctctttcgtcatttcttttaagtaatcgtgtatccgtgccccgtttggccggaaaggcttcggatcggcccggcgggcgatgtaatcttcatatggcggcaaatattctttttttgacagaagatggagctggtctatacgcaatccgtccacgcctttatcgagccaaaatctcatcatctcgtacacggattgccgaacctcgggattttcccaattcaggtcggcttgtttgacggcgttcatatgcaggtaatattcgcccgtatgttcttcgtactgccagacggattgtccgtaatccgacacccaatcggtcggcgggccgtccgcggtgcccggccgccaaatataataatcgcggtatttgctgtccggattcatttccgcctctttgaaccaaggatgctccgtggaggtatgatttaagacgaaatccatcacaagctttaatccgcggctgtgggattctgtaagcagatcgtgaaagtcctccatccttccgtaagattccataatcgcttgatgatccgtcacatcgtagccgttatcgacgtttggcgacgggtaaatcgggcagatccatatcacatcagcgccaagttcttttatataatcgagacgcgcgataatcccccgcaggtcgccaatgccgtcgccgttcgtatcttgaaagcttcgcggatagatttgatagacaacggcgtctttccaccagtcattctccatcttgcggcccctcctgttttttagagaaccatttcctttataatccttccctaaacaaaaaagagaaggtttcccctcctcttttaactttccagctgagacggataaagcgtcatgcctccgtcgacgaaaagtgtcgttccggttacgtaactcgcttcttccgacaccatccatgcggcggccgcggcgacttcttccggttttccgaaggcgttcatcggaatttttttcagctgggcctgtttatgtgtttcatcttccagatccttattggactccgtggcgatcgtgccgggagcgatggcattcacccggatgcctttttctgcgtaattgagcgccatcgtttccgtcatcattttgatcccgcctttggatgccgagtactgcacgttttcaggacgcggtatttgctgatgaacgctcgatatgtttaagaccgttccttttttgccgcgctcgagcatatgtttcagtgccgctttcgcccccaaaaaggtgccggtcacgttgacgtcgatgaccctttgccaatcctccaggctcatttcatggggcatcgcttcggccccgttaaagccggaattgttgaccatcacgtccacacccccgaaatgctcctgggcggcatcaaacagcgcctgaatcccttcttctgaggatacatcggcttttacggtgacggctctgcctcccgctttctcaatgatgtccgccgcttcttccgctccggcggaatcaccgaggtagttcacaaccacattcatccgctccttgccgaagcgttcggcaatggcttttccgattcctttcgaagaacctgttacgatcgctgtttttccctgtaaatcctgatacattgtctcatttcctccctgatgttaatacagagcatgtacccggttttaatcggctgaaaacaaaaggaatcataaaaagaacgatgaagccgaagctccctcgttctttttttcattatgcgtagttgttcatttgcagccttttttgcacgccgacaagcctgctgaaaaaataagatgccgctttgtagttctcccgttgatgaaagaaatgagccgcgtcctgaagcagttcctctgtgtcagccaacagctcttttgattccagaatgtcaaaatactctttgagcgaatcctgtccgccttccccctgataaagctctttaatcagacggaatttcgtcatatagatctcatcttcccactccgccgcgcttctcatgccccgcgcgcagctggcggcggcttcactgtatttttccgttttaaagtagatatgcgtgagtgaaaaaacagcctggatgacctgccggaagctgtgtgcttcaaatccggcagccgcccgttcaaaatcctccgccgccttgcaaaaatcacccagactgtacatacagtgcccgatattataataggccgcagcaatcatatattgatcatcaagccgctccgcgtgctccaaggcgcattcgaggtattccagcgcttttttatgctgctgggcgtccatcagatttccggcaatgataaatttgcactgcacccttctcattccgtataattcatatttcttgtaaatatcaagcgcctgccccgcgtaattcatcgaaaagaaagtctgcttgatatgatagtacacctcagaaattttatacagaaactcggctttctctatgtcatcttccacatattcaagcttttcctcagcccgcttataatgagaaatcgctgagatgaagtttttctgcttaaattcatacattcccctgaaatagtaaaaataatattccagtaagccggtcagcttttgctggttcatctcaatctcagtgagcatttcagagaacggaggctggcagtcgccgtctttcatgggttttaatttatccagcatgatgcggtgccgaaattccatcaatgaaaaatacaacaataaatcctggttctcttccatatcttcgagttcatattgaatctcccgcttcagcgcttcagcttgatcggcttcaaacgcgcggatcagcttataccattcattcatctttacggccacttcttcagatggaatcttggatttcatagatttgcctccttcctccggctactaattatgttatattttatcatagcaaatttatggcagtgagcaaacaaagatttaaatcaattaaagaaagagagaattcaccatgaaacgaccagtcagaattgcgctgcttttgatcctcttcttttccgcagacctatgtttttcctatgtgcagaaagaattgaggccgcagacggcattacaagacagagccattccaagcgctcttcatccgctcgtgaaacagaatgcggagctattgcagacggccgctctgaaaaaaggcatcaccgtcattatcacagagggtttcagatcaattgaggaacaaaacgaattgtaccgtcaaggacgttcaaaaaaaggaaatatcgtcacctacgcaaaaggcggggaatcttaccacaattacggccttgcgatcgacttcgccctgcaaaaaaaggatggaagcctgatttgggatatgacgtacgacggaaaccgaaacggcacgcccgattggcttgaggtcgtatcgattgccaaaacgctcggttttgattggggaggcgattggagaggctttaaagattatcctcatttacaaatgatccctggctaataaaaccttttcttttttcgcttttgcgcatcaatgtacggaggatagacaggcctgtacacaagcttatatccttcattgccggacggcgtaaaatcgcgctgccactccagccgcagatggaaatcggataaaaaagcggcctttgcttcttcgggagtaacggccggcaccggattgatcttctccagctgctccgggtcaatgtcaggcgccatgtaagcttccacaagccccgttacgggactgacaagtattctcgcagcgccgaaccgcagcggaatatcctgatgccatacggaaaaatggaagcggaacctgccccttccgtccgttttcagcgggttcattttaaaaaactcgtccgctctcggataaagcttgtataaaaattgaagcgcgacggtctcacactcttccgcagaataaaaggccgggccctgatgctcaataaaagatttaaaggctgtcattttccctgtctttttgtccgttttcatcttcattgtatttttgttgctgctttcaaaatagctttcgatactcaaatctttccgttccggaaccgatcctttccgccatgtcgttccgatctcatccccgagatcgcgccggcgcgtctgaaccatatccgaggtaaaccccattaattcatccaggctgatttcccgtttatgttcaaacgcgggaagcggttttgccggctcattcctgtcttcgcaaagctgctgatccggcacgatatcatcttcaccggccggatagctgtaagccggcagaatcggttcatagacgagacgcggtattttctcaaaattgaccacatcatagacgagactgaatgtcagcacactcatataatgcgagacgactttttcccgatcgacgaatgtttccgggacgggcgcttcacccttatccccgtaatagataaactgcacgacgaagccgctcctggttacatcaacgaaaaaacctgaatcgggaagcggccggccgagcactttttttgtatagataaatcggatgcacccattgcgttcttccctcgcctgaaagatgaaattcataaaagtaagcgggcggtgtctcgccgcaaaccgaagagccgtcagctttaattcggcgtctgacagcttcatgtctgaactcggacagtcgttgcgtgaataggtaagcaaagatccatcgtcgcccagctcaatcgtgaccgttttatccggatggttacgatctttccatatataataggctttcgttttttgtttttcatcataatcttctatttcaagctcatagtccagcggtatgttcccgatttccagcgctttttttctcagatgttctttcagcaatggggtcatcctttcagaagagtgtataaaaaagaactgttttttattatataaaaacgtccttatccttttaaagggaagaaagtgccttttatgtgtctatttttagcaaagagggaaaagagccgtattcagagcggctctttttcatacaaatgtcacattccccgtgaaagccccgggacgaacgcccatgaccttcagcctattaaactcgtgatcgcttcccctgtatgagcctcaataaaccgcgggaaaaccggcttgtatacgagcctgtacacttttccgcagctgtcgtcatcgtaacaacgatcccaagcgagctcggctttgatggcccggcggatcgcgtccttcgcctcttccattgtcaatgaaggaacgggatcgatttcctggagctctttcggatcaatttccggcggcatataaaaagtgacaagacccgtctttttgctgacacagattctcccctctccgaatcgcaaatcaacgccgtccgaacaagccttatatgtaagccctgcgttttctccttcatcatccggttcatcatattgaacccggaaatactgatccgcttccggaaacatggcgaataaaaagcggatggccatgtgatggcattcttcctcggaaaacaccgattcgccttcaacttttataaatgacatcaccccggtgagccggcccgattctttatcatatcttgttttcaatacgtgttcattccgttctttaaacagactttccaagcttttatcttcccgcacggattttgttttttcaggacgccaggcaatgccgatacagccctctccaagatcgctttccctatctttataaaaaccgtcgtgcagcccgatcatgtcattgatgctcatcttttccgcttcaggtgcagggcgtgaaatcgggacatacggccgcgtttcgtcttccagctcttcatattcgtctaattctgcattctcttccttcaggtcggccgatatcggccgcgtcggagacacgatttcatagacgagatggggcttgtcatccccctgcacatagacggactgatgcaggacggtgaacaacagctctgcttcaatatgtttgacaaagtgagccaatgcttcccgcttgtccgcaattgtctccggtcttaacagatcatcggccttcccatggtaagaaaagccggttacttcccctgtcacagccaggtcgatgtaaaacccggtcagcggaagcggcagaccgtcagccatctgaacataggaatatctcacatcgccatcatttgcgggtccgtttttttccggttcaaactcagccaatgcccccggacgatgggtttctaaaaacgcccgcatccgttcttctatgtccgattccgaaagagccggcagatcagtctggaaagccggacgggataagtatttcagttttccgtcccggtctaattcgaccatgatgccggcttccggatcattcttatcttcccaccaaaacagaacctcatcttcctggtattcttccacattactctcgtagcgggcaggtacgtttccgattcggagagccagctgtttcaattcttctttattcatcataacacttccttttcttccaaaaagattgatgattaccaagactcttttatacaaaactagtataattaacctgtccgtcttcatgactatcgaattaatcattaacaacagggggtaaaccagatgtccatcaaaaaaatgagcgccgtgtttttcattctgcttctcacggcatttaccgccgcgtgcagcagcgaaacgagcggcggccaggaaagcagcacggcgaaagtgaaaataaaagagacggcatgggccgcttcagacgatactgaacatccggccgcgctgaaagtaacggtcaccgtcaaaaatacgggcaaagacccgcttaccgtcaaaagcagcgacttctcgctttatcaggatgacgcgaaaacagccaaggccgataaggaagacttgatgcagagcggcacgcttcatgccggtaagacagtgacgggcaatctgtacttcacagctgacgaaggcaaatcctatgaattggtatatcagccgcaggcaaaagacgcgaagcctttatcttataaactgaaagtcaaaggcacagcctccaacgcaaaacctgacccggcggacgcattatccgcatacattgatgtgatgctgtacggcaagcacaataaagatttcacccgcctgaccggtgtaaatgaaaaaatgacggccgccgcatatcaggaatcggcgaaagccagctttatcgcttctgcaggcatttcacaagaacaggcggattcaaaagccatttccgctattattgacgccatgtcatcagcgcttcgggataacacagagctcaaggtgcataccaaatccatgtcaggcaaaaaagccgtccttgaagcaaaagtgacgccgcttgatatgtctccgcttgcgggccagctgcaagaccgcgtgcaagactatgccggaaagcaccctgatgctgatgaaaacgaaattgtcagccacctgctttctgtctatccggaagagtttatgcgcctgaaaccggcttcttcttccgttacaagggaaattgagatgaagaaaaacgcccgcggccagtggtatctggatacagacgccgatctggaaggattgacagaagcgtttttgaaaacgtcctgacaacaagaaaggaaatagcgcaggctatttcctttttttattttcacttaaagatgtcactgatatattgaacctcatcctcggttaactgcacatgaagcgcgtccagattgtgtttcagctggtcggggcgtttggctccgggaatgatcgcatccactgccggctgcgacagaagccacgcgagtgcgatatgcgctgtctgcgcccctttttcctccgcaacggcccgaagcttatccactctctccaggttttggcgaaaagcttccccctgaaacggcggcctgttctttcggctgtcctcaaagactgtgtcttttgtaaactttcccgtcagcaagccggaagcaagcgggaaataaggaataaaggaaatgccgttcttttcacaataaggcagcagatcatgctccgcctcacgctgaatcagtgaatattccgattgaaaaacctctaaatagccgtccgcgttaaactcctgcaattgccggaagctgagattggacgcgccgattgctctgattttcccttcgtccttcagttcttttagcgtgcccgccacttcggagagcggtgttttgccgtcagggaagtggacgtaatacaaatcaatcacgtctgttttcagccgcttcaggctgttttccgcctcactccggagaaattcacggctgttgtccagctcgatttgtccgttgacttctttatgcgcgccttttgacgcaatcacgaggctgtcccgcacgccgcgctctgcgacaacttcaccgattaactcttcggaacgccccaaaccgtatataaacgccgtatcaataaaattgacgccgccgtccaacgctgtgcggatgagttcttttcccgtttcatcattaagattcggaaacaaattatgtcctccgaccgcatttgcgccaaaaccgatacgctttacccgtaaatccgtcctgcccagcgtacgtgtctcatccatggctcaggctcccttccttttatcgctctgtttagtattagatagacggtaagaattatcctgcctgagagcctatctacagaaaaaaccttgaaaagcgtttgcccttcaaggtttttttgctgtgtattaagatgtcagagctgcggcgaagcgttcggcttcatccgtgagagcaccctcaatttccttatagcggctggaaatcgttgaggcgctgacgccgtacttcttcgccagcttcgcttgagaaacggacgcgccgttcagagaaatgctgtttacgtaatattcgaccgccgccgcgaaagcttcaggctttctgatcgtcggtgtttttttgacacagaacgttttccacagatcaattacggccggaaccagctcagccgggtattcatccccgctcaggcctttttcaatggcgtctgccgtttccttctccatgtcgttggcccactctgtctgtttttcttcagcagcctgctcaggctcttccgccgttcctaaaagagcggccagcacaatgtcgaagttgtcctgcataaagcgctcaggcgattttccttccgcaagagccggggcagccgcctttttcactttgctgattagagcttcggtccgcttcacagggaagatcgtaaattgcatgaagaactccgctttttccgcttcgtggatcggatagccgagaatcaggcttcccgccggcggaagatcctgctggctgacgtccatttccactttgaattgttttttcgtcatcacatcttcaaagtgaatcattccttctttcacatcttcaagcaccataacggcaggtgtcatgcttttccatgattcaacgatttcccgtgttttcgggcggttgatgccgccggcttttttctgaagatattcttcaaaaatcgtcttgccgcctgccagcggacggaagaaaattccccaaatgccgaggttgaagactccgatgtcttttgtctgtctgtccagctccgtaatgaacgcgtgctggttaataaatgatgatatgccgtctctatgtgctgtaaaggcgtactccattaggctttcctgaatctgtttcgcttcttttgccgcgatgtctgccggaatggcagcttctttgcttccgcagcattttttatatttcttcccgctgccgcatgggcaaggggcgtttcttttcacttttcccacaataaaccctccgaattctgatataactttattattttaacaaaaataacttcagagggcttggtttacggcgaaaaaagaatatggaagaaaaaaagaccccgggatattctcattctccggggctttgaaactgttaatttgtattttgtccgccgccgttcagaccttctttaatcagcccgtttacttggctgttcatcaaaagtccgatgtgtccgacaccgtgaatctgcacgtttttcccgccgatcagccgtgacagcgggttcaggacgattaagtccgctgagctgtaaatcgatgtatataaaatcttttggttcggatcagtccccggaagcgcccggttggtcacaaggccgttcgctccgcccagtgtgacgacgtttgcgattttgtctccgccgtcaagatttttaatgtaatagagcgtgttggcgccgcccatgctgtgcgcgacgatatcgacttttttcgcacctgtttcgctgagcacttttttcacgtaattggacagtctcggtgcattgtgtctgttgtttccggttttgtccagaaaatcaatggcgtacatctcatttcttgaccagccttgggatgccaagtacgttttgattcccgcgaagttaaaggacgccccgccgattccgtggaccatgacaaccgggttatgctctgaggaagctttcgatacggtcggctggaaggcaaatacggaaatgacggagagcatgcagactgtaagaatcgctaggattttgcttttgatttgtttcatgaactttcctcctgttatgtaattttttgcaattttcattttattagagaagaaaaggaaaaaatagagtattttttactgttttcaacaattgaaaaagaggcggaaaaatgagaaagacgcccctttcccgaaagcacacttatactttaatacggcaaacaaaaaaaggagagaacacccggttctcttctcctagtactcattgaaataggtttgaatccgcttagggtcatgcgtttttgtcagcgcgagcatcagcagaatccgcgctttttgagggttgagagagtttgaagctgtcaaatggtctttttcatactctcgattaggtgttaccgttccgtttcccgtccttgtggagcggacgaccgccagcccgcttttgaccgactttacggcgcctttatgcgccgcatcagacattgagccgtttcccgggcctgcaaaaataatgccttgcgcccctgattttacagcagcttcaaagagatagcttccgtcattttgatagccgtatataatatcgacttgcggcagtttatcaagtttgtctatcttgaaatctgtatccttcgtatgctttcgggtcatgatgttattaaaatagatgtcatcagcaattgttccgatataacccatctcttccgatttgaatgtgtctgccgcggttgtattggtttttgtcacatagcgcgccgaagcgattctgtcatttaatacgacaagcgtccccttacctttcgcatcaggcgcagccgctgtttttacagcgttatataagttggacggcccgtttgctccgatcgccgtggacggcctcattgacccggcgacaacaacgggcttgtcacttttgaccgtcagattgagaaagtaggcggtttcctcaagtgtgtctgttccatgtgtaatgacaatgccgtctgtatcatcagacttgagcagcttgtttacccgttttgcaagtttcagcagtgtctcgttattcatattctggctgcctatattcacaacctgttctccgctcacatgcgcgacctcttttatctccggaacggcctgaatcagggcatcaactccgattgcccccgccgtgtactccgtagcggacgtctttgaaggagcagcgcctgcaattgtgccgccggtggcaagaattttaacattcggaagtccgtcttttttcgctggggctgcggctgccatccggggcggtgtttctttcgcttgaggagattgggagcagccggccgcgatgaagagcagagccgtgataaatgtaatgaagggcataaattgttttttcattcttttctctccttttctttatttatgaagattttcctctcaccggtcaacgcgcttgtcaggcaacctcccgaagaaaataaccgttaaaaaaccttgacaccgtcatgtgaaatcaagataatagaccagtcactatattttaaatttgtcaaaaatcagtaaggtgggaacattatgagctatggagattctcgtgaaaaaatcctcgccgcggcaaccaggctgtttcagcttcagggatattacggcacggggctgaatcagattattaaagaaagcggtgcgccgaaaggttctctttactatcattttccggacggcaaagagcagctcgccattgaggctgtcaatgaaatgagccattatatccgtatgaaaataaaagaaagccttgatgcccatcctgatcctgcggaaagcattcaagcgtttttacaggacttatcaagccaattcacatgtccggaaaactttgaagggtttcctgtcggtttactggctgccgagactgctttaaagagcgaaaagctccagcaggcctgtcaaagcgcttatcaggaatgggagaatctgttcgcgggcaaattgagatcagccggtttttctgatgagaaagcggcggaaatcagcactgttttaaatgccatgatagaaggcggcatcattgtgtccttagccaaaaaagacaaaatgccgatcctccatatttctaaacaaatcccgaacctgctgaagacataaaatacgagagacatgtacgtatagaaagagaggagaatgattttggaaaatgctcagccttccaaacaatataaagtcatgccgatcatgatttctttgctgacggcagggtttatcggcatgttcagtgaaacggcgctgaatatcgccctgactgacctgatgaaggagttacatatcactcctgcgaccgtccagtggctgacgacgggctatctgctcgttctcggtattcttgtcccggtatcgggtctgcttttgcaatggtttacgacgagacagctgtttatcgtttcacttgctttttccattatcggcacgctgattgcagcgcttgcgccgagctttccgtttcttttggcggcaagaatcgtgcaggctttaggaaccgggctgctgctgccgctgatgtttaatacaatcctcgtcatctttccgccgcataggcgcggagcggcgatggggacgatcgggcttgtcatcatgttcgctcctgcgatcggtccgacattttcagggcttgtgttagagcatttgaactggcattggattttctggatttccctgccgtttcttgtgttggctcttttattcggcatcgcctacatgcagaacgtgtctgacattacaaaaccgaaaattgacgtgctttccattattctgtctacgatcggatttggcggcatcgtattcggattcagcaatgcgggcgaaggatcagacggctggtcaagcccgacggttatcggttcgctcactgtcggtgcgatcgcgctcatcttattttccatcaggcagctgacaatgaagcagccgatgatgaatctgcgcgctttccgctatccgatgtttgttctcggtgtcgtgattgtatttatctgtatgatggttatcttatcaacaatgctcctattgcctatgtatttacaaagcggactgatgctgacggcgtttacgtccgggctcatcctgctgccgggcggtattttaaacggctttatgtctccggtgacggggcgcctgtttgataaatacggaccgaagtggcttgtcattcccgggtttgtcatcacggccgccgtactttggtttttctcaaacattaccggcacttcaacggccattctcatcgtcgtgctccacacatgcctgatgatcggcatttccatgatcatgatgccggcgcaaacgaacggcttaaaccagctgccgccggaattttacccggacggaacggccattatgaatacgctccagcagatggccggcgcaatcggcactgcggtggcggtcagcatcatggcagccgggcagaagaattatatgagcaccgtgaaaaacccgaatgatccttccgcatactctcacgcgctgattgcgggcgtccagcacgcctttatcttcgcgatgattgtcgctgttatcggcttgatcagcgccttctttatgaaacgggtcaaagtgaatcactcataagaaaacagcaggctccccgggagtctgctgtttttttatataccgcgcgcttcagccagttcatcaatcgcatacatcagatcatcggccgtgttatagaaatgaggcgccagccggatgatatgtccgctgggtgcgcatacgatgtttttccgcctcaacagcgcagccgtttccgccgctttttcatcccgtatggagatcatgccgggtctgtcatcggcagacggcggccctgtgaggtgcaaccctttttcaaaagcgtattcacacgcaaatgcgctgagtttttttacttcccggtgaatgcggtctgtgccggcatcgttcactagagataaagccgcctgtgccgcatatatgctgataaatgccggggttccggtctcaaagcgtttggctccgtccgcataagaaaaacgggttatatccagcatcgacgcccgctgctgcccgaaccacccggtgactttcggcttcagctgttcggcgagttcctttctgacataaagaaacgccgttcccggtatgccgagcatatactttctcgcacccgcggccagcatatcaactccccattcttttacatcaatcgggatgtgccccgccgattgataagcatcgacaaaaagaagcgatcccttctttgcggatatctcggcaatgcgcttcatatcctggacaaaaccggacgtatatgacacatggggcacacaggtgaaaagcgtctgttccgatatgtacgtctcataccgctctaacgggatcattccatcttcagacggcacgactgaaagctccatctcagtctgtgccttcaaaatgtgggcgatcgccggaaaatccaattccgtatacaccgcctgtttctttcggcaatccggtaaagcagaaacgacggcagagacagcagccgttactgaaggtaaaacggcgatttcttcaggatgggcgccgatcaatttcgcaaattcacaccttgcctgctccgttcgtccaatggcttcttcccagtttccgccatgctgaagcaggctttcctgatagtcattgatcgcttttgaaaccggcagggcaagagcgctttgagagcagctggcgagcatcgtatgtgtgcggagcgccggaaataaagatcggtattgcaccagaggcgaattcaagacatgtttcccccttcggcaggaatatatgtccattatagagtatggtaaaaagaaaaggagggttttatatggagaaaaaagtattgctgacaggctttgaccccttcggcggggaaacggtcaatccttcatgggaagcggtcaaacggctgaatggtgccgctgagggccccgcctctatcgtatctgaacaagtgccgaccgttttttataagtctcttgccgtgctgcgcgaggcgatcaaaaagcatcagccagacattatcatctgtgtcggacaggcaggcggcagaatgcagatcacgccggaacgggtcgcgatcaatctcaatgaggcgcgcataccggataacgaaggaaaccagcctgtcggggaaaacatttctcaagacggtcccgcggcttattggaccggccttccgatcaaacggatcgttgaggaaatcaaaaaggaaggcattcccgcggctgtatcctacacggcggggacgtttgtatgcaatcacctcttttacgggctgatggatgaaatcagccgccatcatccgcacatccgcggcgggtttatacacatcccgtacattccggagcaaaccttgcaaaagtctgcgccgagcctcagcctggatctcgtgacaaaagcgctcaaaatcgccgcggtgaccgccgcggcgcatgaggacgatattgagaccggcggaggcgaacttcactaagctgcagacgccgcctcggcccatttcttccggtaaacgatgcgggacagcgtcacactgatttcatagaggacgagcagcggaatcatgacgagaaagtcagacataaaatccggaggcgtcatcagcaccgagacgacgatcagcacaaaatacgaaagcttccgcgcctttgccagccgggttggattcacgattccgagccgtgtcagaaacatgacggccagaggcatttcaaacaaaaatccgaacggcaatgtaagattcagcataaaggtaaaatacttgtccgccgtaaataccatgtcaaaatggccggcggataattgtgttaaaaatccgagcacaatcggaaacagcacaaaatacccgaaggaaattccgatgataaacaaaaccgaaagccccggaatgtaaagcaaagcggcgcggcgttcaaacggggtcaaagccggcgccgtaaaacgccagagctgaaaagcggcaaccggaatcgctgccgtaagggcgcatattcccgcaatcatcatatacacccataaaatctcgctcggccctaaaacggccagcctgccatccaaatccttgatcagccagtcataaatatcctgcacaaaccagcaggcgccgataaaaaacacgagaaaggcgataacggttttaatgagacgctgccgaacttcctctaaatgcccgatcaagtgggtttcttttttatccaatcgtacatcctccttatagagaaagaggcagaagcggattcgtctgcccccatgtcaggattcagcctgccgttttgtctttctcagccgtctgcttgtccggctcttcatttgagaccagtgtttttgcggcgcttttaaattcaagcagcgtgcggccggcggcacggccgatttccggaagctttgaaggcccgaaaatgatgagagcgatgacgaagatcaggatcaacccgggaatgccgatattagaaaacatgagtgtgcctccttattgtgagattttggcccgtttctttctcatttgcttttcatgcgcattgttatgggcgaagaaacgatcctcttccacctcatttgactgctttacaccgcctgcaaccgcagcttgagagaccttccgaatccccgtctggtctttctgataaatgaatgaagcccgcgtggatacctcagcccccggctccgtcacgtacggcaccactctgtaatccgctctccattgggcaggggtcaccgtacagcggacatagccgcggtaatcgttgaaaaacttaatatgcgggttttgttttaagatctgatccgtatcggcccgtttatccgctccgtttcctccagatgtaatggaagttccgacgaattcggctccgaaaatctttgaattcgtttgattaaaatcggtatgcaggtttgacgcccagcttgcgtgaacatcacccgtcagcacgatgacattgttcaggtttttgctttttataaaattgatgacccgctcccgctgagccgggtagccgtcccatgaatccatgctgtatatcggattggcggttgttccgaaattccattgcgcgaaaaagatttgctgcgccagcacattccacttcgcttttgaggcggctaaatttccgaagagccattgctcctgttctgtccccatcaatgtacgcttcggatctctccactcatcagaaggcggcttattcccgtcgccgttggcctgatcatctctgtactgtcttgtatcaagcacattgaacgatgctaaattgccataagaaaattgcctgtacagccgcatatcaggaccgttcggcaatgacatgcgcctgagcggcatgtgttcataataagcctgataagctgcggccctcctgagcacaaacgcttcaacggattggcctttttcagggataatattggcataattgttttccacctcatgatcgtcccacgtcacgacccacggaaatgcggcgtgggcggctttcagattggcatcagagcggtattgggcatgacggttgcggtaatctgacagtgtatacacttcagcgctgctgtgcgtcctgacatttcccgtttttgacacatattcgttcggtccgtattcataaatgtaatctccgagatggaccacgagatcaagcttttccttcgccatatgtttatacgccgtataatagccgtgttcatactgctggcatgaagcaaatgcaaacgtcatggcggatacgtcagcaccgggagcgggcagcgttttcgtccggccgacaggactgagctcatgcccgcttttaaaccggtaatagtacactttattgggcttaagcccgtccgcctcgacatggacggagtgtccgagattcggcttggccatttccgttccgcgtttgacgatgtgacgaaaatgttcatcagcggcgatttcccattttaccggcacggcctgcttcggcatgccgcccccattcagcgggtcaggggcaagacgcgtccagagaatgacgctgtcagacagcgggtcgccggaggctacgccgagggtgaacggatagtttgaaaatttcggagcggcattcacttcaaacgcgccgatggattgcgcgatcgctaacccgagggaaagaccggcgattttcccggcgccctgtataaatgcgcggcggtcaaacgtattgttctgaaagcttttgttctccaattccttgatccattcatctaaacggccgtcatgtgtcatgtcagttcccctttcgtctcattgatcgcccttattataaaaaagaaatgttaaaccgctatgaagaagtgtgaagagtttgtaaggctgaaaaatggacggcgggagacatttttcacattgtttcgacaaaccttgccccgccgggagaaaaccccctctgtttgtttttggcttgtcatccgtcaagcgcacttttttcctatttttcttcacaaaaaattaaaaaaacaccgttcattctcagaacggtgcgcccgggattaaaatgtattgtacacgttttcgcacgtctcacctgtcggctgatagaagcagtgggatttgaatctggcgacaaacggctggccataccaagtctgcgggcagttgcccggaggcttaaaataccacagactgaacttagccggccaaaaccgttctccgttaatcgtccggcgggcaagcctccgctcggattcacgcggtctctggtaaaagtatccgtgagtcaccgcttcaaacgcgtgcggctgaaacaccatctgcctgatggtgcgcaggcctttaaaatcagaacaattcgcccgcacccgattgattcccacattgccgaccaaaagcattccctgcttcccttcgccttccgcttccgccctgagcagccttgccattagatccagatcggcgctcgacgcttttacgactgccatcatgacacctcccgtattttctcccttcatcatattcagccgcggcccagtgatgacagacaaaagccagaaaacaaatgttcacgaaaaaagggtttatatttcacgttatgaggaaacatattaacatgatttccataaggaggaattcgcatggaacacattaaagcgcttgccattaaaggcattatgaccatcattattctgtacctgatactcggcttaggttttcgctttacattcggcgacgtgctgctgatgaccattgtgctgggagccgtttcctactttacgggcgacctgtacgtgcttccgagatggaataatatcacggcggcgtccgctgatttcggaatcgcgtttcttgttgtctggctgatgggaatgccgctgtccatgggcatttccggaggaagactggcgtttgccgctcttatttccgccgtcatcatcgccgtcggagaatattttttccatatctatctgatgagaaaagacttgggcgggtcccgttttttagaaccccggtccgaataacgtaaaaaaggccggataaaagcccctttaaagggggctttttatttgtaaagtataaacgctttatacatcttgatataactgataaatccttttcagcctttcttcgagctgttcaaaatgaacaaagcgggcttctctcagaaactcagtcccatcaatgaacaaaagaagcacggggacagtgaagactgaaaatctgccggccacctcttctacctcgtcagcattgatatgccccaatttgatattcggaaactgatccaatacgtttctgagctgcggcagaacagcgtgacatactgtacaggcgggtcttgaaatgtagataaaactgaattgatgctgtttaataaaattatcgatagaatctaatgaatgtaattctgccatctctttcatcaaaaccctcctccaaatcggctcgtctttcatgaccaagctcatcaatacgcgtacatccactatacacatttattttgaacatatccgcttttttgctattcagagcacctgaacgttgtgcttgaaaaataaaagaacagttaccgcttttcagttactgttcttagatacttatattaaaaatgcagagcgtactcccctgaaccgatgagtgcaactccgatggagactgcaaccagcaccaagttatattcaaaaccgccggcaccgttggcaaatcctttcgctccatggacttttacgatggcacctaacataataatcgttataatagcagctccgagcgggaggaaaacacctaaaataaatagaattccgcttgcgagttccccgagacctgataaagcggccgcggcattgcctggtttaactccaattgactcgaaccattgtccggttcctttaattccgtatccgccaaaccaaccgaataatttttgtgatccataaaacagaaacaccacaccaattatgattcgaataagtaatagtcctgcatcttccattgttatctctccttatttttcatattatatgatgtctgcaaggcagctgtttaccaacagtcgcttccagcaaacatctgttaaatgtatatctttttatttttcttcatgcttcacgttcatctatcaatcaacctaattctctcacttcaaacggcagcagccctagttcaatttgtgcccggtgcggttcatactgctcagggagcatcagttttccgcccattgtttcttgggactcatcatgggcaaagcccggcggatcagttgcgatctcaaataagatttccccgtgttctctgaagtaaactgcattaaaatagtttctatcctgaacaggagttacaccatatccgtgcgcagcaatgaacctttgccaatctaattgatcttcgtcatcctgagcccgccaagcgatgtgatggaccgtgccgacacccatttgcccgcggccgataggcgttaacttaaggtcaatcacatttccgatatcaccggcagaacgataacgaacgaagtcgccttctttaccgactcgctcaagccccatgatgttttccagcagtttacctgttttttcaggctgtgctgataacagggtcgcaccgccaaagcctttaatggcaacatccggggttacatctccgaacgtccatgtattggcttctccttcttctctttccacgatttccaagtgcagaccgtgcgggtcatcaaattctatatattgttctccaaaacgctcgatttttgtgtatggaatgttgaacttttcaagtctcttttcccaaaacgccacggcacccttcggcacggcgtaagatgtcacgccaacctgtccgtctccaatgatgccttggcgggcgcccgcccacggaaagaatgtgatgattgttcccggcttcccgccttcatccccaaaataaaggtgatacgtacccggatcatcaaaattgaccgtttgcttaaccaatcgcagccccagcactccagcgtagaaatcagcattctcttgagggtgaccgacaattgccgtaatatgatggatgcccatcgtttttttcgccatttttatttgctcctttacaaatagttaaatatactccacaaactcattcacaggctttcggtagccgcgcggccttctgctttctattttttctttcccgattgtaatcatcatgacgacctcaaattgatcatctatcttcaaaatctgtttcacggcttcagcatcaaaccctatcatcggacaggtgtcccagcctttttccttagcactcagcataaacatcatcgcagaaattgaagcatttcttatcgcctcatctctcttaaatggttctcccctgttttcataaaacgaaacggtgtcttgaaccatgtgatcatactcttgtttatttaatacccccagcatcttcaatccttcatagatgtcagccgcttgctgatatgcctgcttatcccctaaaaccaaaagaacagctgatgagctaaacactttatattgtccgtttgcggcctgtttcagcttttcttttacacccgggtcaagaaccgccacatattttgtatgctgcaaattaaaagctgatggagccaacgcaaccaattcaaacatttcattgagctcgtctcttgtgattggatgttctggaagaaagttgcttgcagatcttctttcattcactagctgtacaaattcagccatttccctcgcaccccttttatttcgaattcgagatattatcgtataaaaaatcaaataacatatgatcaaaaacgaaacgttctcttcactgatcttttcgtgattcaaacgatcggcaggttcttatcctgcacactaattaaattatctcgaattaaaatatcttgaattcaagataataataaaagataaacactcaaatgtcaacagttctttttttaattcagccccaatttgtctgtgtactgtttagccctgctccaactttttttctgtcaccttatttattagtaaacaggaaacaaccttgctatagacccactcgaaactgaattggtacgataagcaaagtgattacacaagaaaggatacggagagcgaatcaaaagcgcctctatttttttgtgcagttttataggaggaaaaaatgacaagtgaaagagaacaaataagcaaaaaagttgctttgattgcattgatagccaatctgatcttaatggcaggaaagatcttttttggactgataggcgatagtgaagcagtttttgccgacggtatacattctgcagcggatgtcgcggcttcaattgctgtcctggccgtcatcggcatttctaataagccgcctgatcaagaccatcctttcgggcatggcaaagctgaggtcatcagcgaagcgattgtaggaatcatattagtgctcgtttccgtgtatattctgatagaagcgatttcgtcctttgttgaaggtccaagcatcccgcaatacagcgcattgtttgcggctctgatatcctacgcggctaagcagatcttatatcgttattcgatcaaacaaggggaaaaatggaacagtaaagcgattatagcgattgcatacgatcataaaggcgatatcgttgcctctcttgccgcttttatcggcgtcctattggcgattatcgggaacacacgcggatggtcctatctgttgtacgccgatgcaattgccagtgtcatcgtggcgtacctcatttttaagatttcaatggaattaatcaggccgtctgttgacgttctcatggaaaaaagtgttgatcccgaactgatagaggaatataaagccgttattttgcactgccctcaagtcaaacggctcgataaaatccgagcaagagaacacggccactataaattgcttgatgtccggttatctttggatcatgatttgacgattaagcagggacacgatattgcccgcgaaatccgaaatgaaatccaaagacacttttcagatgttgaagaagtgctcatccatgtgaatccttattttgaagaatgaaaaagcagcttgtagagaaaatgatgtttttctacaagcttttttgttttgtgctgtttctttacatattcatttgatttcaggtgcagaaaaagcactcccgcatgcctagccttgcttggctgggtatgtggcaatcttccacatcattttgaataagatcagcggatcaagtgagcgctgcagtaaggtttgaccttttcaacgatgaaagagaagtctatgtatttatcaatttttcgaagaaggtgatcctcttcgacgagttggtcaaacagaacgaattcggctgtgttttgagaaaaatttcttgtgtggaacatgggaaagaaaccgttttttcagtctttcttttattttatgacaagggaaacataaaggctgtcgagattttctcgacagcctgaaggccggataacggcctttttcgtttgatttcactgatcaatatgctttctgataaaatgcagcagcgtgtttccttgagcggtcaatatgacgcccttcgcgccgcacttcggacagggcgtcccttccttctcctcgccggttccttcacaatgcggacacgtgagctcaagatcgtcggttgcgatcaccatgaatatccctccttttttgattatctgtccgtctccagtcactttccatggccatcacctccttaacaacacaaaaaaaccccgtccatcaaaggacgaggttttcgcggtgccacctttattaacggctgaagagccattctctcaaaaagtacagaaacacacggtttcaatactcctttcttgataacggggaaagaatcccggcaccgcctactgtcatttcagcgcagcaattcagaagcccattcggcaccggacggggatcggttcacagcggccaccgactctctgaaccccgcgcgctgatgcgtacttactcttcctcagcattgttcatccgttcttttattttaaaatgtatcatacgctgtcatccggcggaagtcaataacctttcggatcggacaggccgagcatgtcccgcgccatttgcatatgctcctcttgccccgtctgaagcgcgaacttcgccgtttccgcagggtaagcggcctgccattctgtcacatgctcctgcattttcggccagacgcgcccgccttcagcttcgcagctcttcatcagccgttttgtttctttttctcctaatatcacttgataaaggacaaaatccttggccggatcggcaacctttgcctccgtccaatcgaggagacccgtcacacgctgattttcgccgatcaaaatatgcggaggatgcaagtcgccatggatcagcgcggaaaaaacaggccattacgaactgtcatttatccacgtttgccatcttttccaatgccagcttaccggctgcctccgctgacaaattttgatccttcgcgtaaatctttcgcctccaaaaagaagacgtgaatgaattttttcatattcactttaaccggagaaagcggcgcggtttccttagcctgcatttctttcattctcttgctgacagcggggaaatcaaagaatttcgaggcgtaatattcaaatttagggtttgaaaaatcagttgtgcccaatgaagcgaaatggtttaacgaatgaatgacggcccttctgatccgctgttccgaggctttgatttccctgttaacctcggcttgtgccgccgcaggccccagcttccggatggcgacgtttgtaaacatctgctttaaagacgggatgtttctttccgcctgttcatcctcaaataaatagtgaaggacagccatgaggtcatgcgccccgctttctcccacgatgcctaattccgataaaagaaattttcctgtttctttgattgatttctcgtgcatcccccccggcccgctttttttcggctcattccgctgaataagacggcttaacgagtgttggatgtcgccgatcgaggtttccagttcaatccgctcttttacttttcgcaaaacggtgacaatctcgattttgttgatcggtttgtggataaagtattcgatgccgagagaataagcttctcccaccatttcctttgcctccacctgcgatatcatcaccgcttttccgttgtacgatccctgaagatgccggatcgtctcaatcccgtcccgacccggcatcagcagatcaattaataaaatatcgacttgtttaaaatggagataatgcccttcaatctggcttccgtcctctgcctcaccgacgacttcgcctaaatcctcgtcctcgatcatctgttttaaaatggaacggatcgcccggtcatcatcagctataaaaaaacgcatattatgagttcatcctttctgcaatcaaatgcttcaccggcagtttaatcgtaaatatgacgccttttggcttgttatgaaaggaaatgtctccgtcaagttcagttacgatttccttcacgtaagtaagcccgatgcccgttgaaggtatgccgaattcatcgtatttggatgtaaacccgggatcataaacgacctctcctattttttccggaatgccggggccgtcatcttccgcctgaaattcagccttttctccttccgccctgcgcagcgcgaggcggatctcacccctgtcacccatggcttcgacggcattggcggtcaggttatttaagatcgacaggacggtaaagacgtgataatcgggatgctctccttcaatcacgctccggaattgaatgtccttgcctaaagattcggcgtatttttcattgattcggatgacgatgccgaccagatcggcggcattcatgtaatcccggaatctctcattggaaatcagcttcgacaaaccggcgaatattcgctgattgtcttttttcacttcatgaatttctcccgcaaggcgcagcattcggctcccgagctcccggtcgttcccgctcatttcccgatatagctgataggattctttcgtcacatgctccgtcgttttcagcgtttttttcaaatgaatcgtttcttcatataagttggacacaatcatcagcatgtgctcatgctgctttctcgtttgtttttccctgacctgagattcgtgcagcttcatcacgttgaaaaaactcagcacaataaatgtgtgagaaacagcgataaccgcaatatccgccagcttgtccggcatcataatctgccggccgccggaaaactgaaccgtcatttcaacggcatcggacgcaatttcaatgagaaaaccgagaaacccgatcatcagcggccgatcccaaaaaagcctgaccttcagcacataaaacaagcaggcatatgtaaagtaaaaaaagaaactgggatattggctgaaaaaagcctccgtaaagccggcatgctctcctccccagcacgccaggccgatccggaatgccacaacggctgcacctgtcaacagccctgacaatactgccggcacatgccgaagcagcagcagaaaaaagaaaaaagccggggcgccgaagctgatccgatatacctcattcagggggtaaaatttcagttcccccgccagcggcacggtgatcagcataagggcgaaaagatagccgtcttttttcagtaaatagtcgagcctgatcataatcacttccttcttctgtctattttgaacaagaccgatacagtccgcaaatttctttagacccgaatggcgggacactccggctgatttataaatctatcggcttattttaagaatgattttgtcgtattttgtatgattctgtagatgtcattatacattatcatggaacacgctatttttgaaaacgttttccaagaccggtttccgcttcggacaggcttgcaatagaggaggaatgttatgaaagatatggtcagagagcgccttgaaaaagaggaactggcttcacttttacaagattgggtcgagcattaccgaccgttttccgtcaatggaaaaagcgcaaattatatacccgccctcggagaaatcaacgactctcagctgggcatttgcatattagagccggatggctcaatgattcatgccggtgaatggaatgtcccgttcacattgcagagcatctcaaaagtcatcagctttattgccgcctgcatgaacagaggcatttcttacgtgctggatcgtgtggacgtggaaccgacgggtgatgcgtttaattctatcatccggcttgaaatccataaacccgggaagcccttcaacccgatgatcaatgccggcgccattaccgtcgcctcgctgcttccgggtgaaacggcgcatgataaattagaatatctcttttccgtttttgaaaaattaataggaaaacgccctcacattcacgaggaggtcttccgttctgaatggcagaccgcgcatcggaaccgagcgctcgcctactatttaaaagaaacgaactttctcgaggcggatgtggaagaaacgcttgaagtgtatttaaagcagtgcgccatggagggtacaaccgaggacatcgctttaatcggattgatacttgcgcatgacggataccatccgatccgacgggaacaggtcattccgaaagatgtcgcgaaactcgccaaagccctgatgctgacgtgcggaatgtacaatgcgtcaggcaaatatgcggctttcgtcggcgtcccggccaaaagcggggtatccggcggcattatggcattggttcccccaagcgccagaagagaacagccttttcataacggctgcggcatcggcatttacggtccggccattgatgaatacggcaacagcctgaccggcggcatgctgctgaaacatatcgcacaggagtgggagctcagtattttttaatcaaacgaaccaagaggtgattggatgcaggaattccttgaaaatgtaatcggctcggcaaatgattttttatggtcaaaactgttaatcgtactgcttctttctctgggactgttttttacgttcagatcaaagggtctgcaagtccgcatgctgaaggaaatgatccgggttttgaaggaaggcgcggccgcccggaccaaaaacagcatttccccgtttcaggcattttgcatcagtatggcggcgcgtgtcggaaccgggaatattaccggaatcgccattgcgatctcactcggcggtccgggcgctattttctggatgtggattatcgcagtcatcggttcggcttcaagctttgttgaaagcacgctggcccaaatttataaagtaaaagatcaaaacggattccgcgggggcccggcctattacatggaaaagggcctgaagaaacgctggatgggcgcgctgttcgccgtattaatcacactgtcattcggggttgtttttaattccgttcaatccaatacgatcagcgtcgcctttcaaaacgcattcggcaccagccggcttacattgggcattattttaatcgtggttttcggcggcgtaatcttcggcggcgtcaaacgaattgcgaaaatggcggaatacatcgtagtcgtcttggccgttttatatatcggtgtcgctttctttgtcattctgacgaacatcacccaattgcccggcgttctgtcgctaatcgtaaaaaatgcgttcggcattgatcaggcagcgggcggcgctttaggtgcggccttgatgcaaggtgtaagacgcgggattttctcaaatgaagcgggtatgggaagcgctccgaacgcggcggcgacagctacgacgagccacccggtgaaacaggggctcattcaggcattcggcgtcctgacggatacgctcgtcatttgtacaagcacggcgcttatcattttattttcagacgcgtatcaccagccgggactgagcggcatcgcgctttctcaggccgccttgagcgatcatgtcggcgcatgggcgtcaggtttccttgccgtcttaatgcttttgttcggcttcagcgctctgatgggcaactattattacggagaaaccaatatcggatttttaagccagaacaaaaaatggctgttcatttaccgcatctgcgtgctcggaatggtactgttcggctgtatttccaaagtccagcttgtgtgggatatggctgacttattcatgggcttaatggtggtcgtgaacttaatcgcgattttccttctgtcgaaaaaagcgtttgccgctttgagcgattatgcccggcaaaagaaagccggaaaggaccccgtcttttacagagatgtgctccctgatgatgacgggatcgactgctgggagtattcagacatcgcgaaaagtgcgaaaggcaaacacatttcctaaacaaaaagtgttcgggcagcgtcctgaacaccttttttctgccggttcattgacaaagagaatagcgtccattaccctttttatatattttcagtaaagtcagaaaggaaggcctatgaatcccattacacaaatattaaatgaatacccggttatgatcatagacggcgcgatggcaaccgagcttgagcggatgggctgtgatttacatgatgatctgtggtcggccaaaattcttttggagagaccagaactgatcaaacaggtgcatgcagaatattttgccgccggcgctgattgcgcgatcaccgccagttatcaatcgacaatcgaaggatttgcagcgcgcggcatcccggaaaccgatgcgatacgtctcattcagacatctgttgaacttgccgcacaagcacgcgatgaattttgggcgcatgaagaaaaccgtttacaccggcccaaacctttggtcgccgcttctatcgggccttacggcgcgagcctcgctgacggctcagaatatcgcgggcattacggactgacggaggatgagctgatcagctttcaccgcccccggatgaaagcccttatagaatccggcgccgatcttttggcctgtgagaccattccgtgcctgtcagaagcaaaagcgatcacaaggctgctggaggaattccccggcacttatgcatggatcagcttcagcgccaaagacggacggcatatcagcgaaggcacgccaatttccgaatgcgcggccctgcttgactcctgcagccaaatcgcagcgatcggcatcaactgcacaacgattgaacatattccgccgctgatagaagaaatcaaacggtcagcatccaaaccgattatcgcctatccgaactccggcgaacaatatgacccagtgacaaaaacctggaaaggcgcaacgtgcgaaaaccatttcggaaaaagcgcgcaaagctggtacgaaaacggcgtgagcctgatcggagggtgctgccggacgaaacccgcggacattcaggccattgccgattgggccaaaaccttaaaaacaacttgactaatcggaatagtttgtatattctattcaaaaagccggttcaccggaatctcgtgccgttcgccggcatgagattttttattagaacggccctcgcagaaagttggaaaacaatgaacaacaagaacgagacgaattttcagagaagtatgaaaagcagacacctctttatgctatcactcggaggtgtgatcggaacggggctgtttttaagctctgggtataccattcatcaggcgggtccggcgggcaccattttcgcttaccttttgggcgcgggcatcgtctatcttgtcatgctttgccttggtgaactgtcagtggccatgccggtgacgggcgcattccacacctatgcgaagacctatatcgggcccgcgacgggctttacggtcgcatggctgtactggctgacgtgggcggtggcgctgggctctgaattcacggcggccgggcttttcatgcagcgttggttcccgcatacttcggtttggatgtggagtgcggtattcgctcttttcatctttttattaaacgccttctccgtgaaattttttgctgaatcggagttttggttctcaagcattaaagtcttagccatcttactgtttattttattgggcggagcagcgatgttcggcatcgtcccgatgaaaagcggtgaggccgcacctatgctatcgaactttacggatggcggcagcctttttccaaatggctttttcccgatactgatgacgatgctttcagtaaacttcgctttttcagggacggaattgatcggaatcgccgccggggaaagcgccgatccggaaaaaaccgttccgcgcgccattaagaccacagtctggcggctggcgcttttctttatcggaacgatttttgtgctgtcagggatgatctccatcaaggaagccggtgtgattgaaagcccgttcgtcacggtatttgacagagtcggcgtgccttatgcggccgatctgatgaatttcgtcattttaacggcgctactgtctgcggccaattcagggctgtacgcgtcatcacgtatgctgtggtccctgtctaaagaaggggagcttcatcccgcctttgccaggctgacctctaaaggcattccttttaacgctctgatcttcagtatgatcggcggcattctgtcgttgttgtcaagcgtatttgcagcggatacagtctatcttgttctcgtctccgtctcaggatttgcggtagtggctgtgtggatgagcatcgccgcatcgcaatttttgttccgaagacggtttcttacagaagggcaccagccttcagacttgaaatacaggacgccgggatatccggccgtaccgatagcggcctttctcctgtgcctcgcctcctgtatcggcatcgcttttgatccgaaccaggccatcgccctttattgcggaattgcatttatggccgtttgctacaccgcttattacttgaaaaaccggaaaagcagagcccgcgtgcaagccgtaaaatcccaataaccaaaaaaagaaccctgcagcgcaagggttcttttttcatttatacttcaaccacccatctgaatgaatcccgcaccttcccgacttggatgccggcaatcgtttcatagagcctttctgacacttcaccgatcaaaccgttattcagttcaatcgtttctccgtgaatgtgcagcgcgccgaccggtgagatgacggccgcggttcccgtaccgaatacctctgacacctcgcctctcatcgcagcatcatagatgtcatcaatggcgacctgttcttccctgacgctgatgccccagctttttaacagctctatcacagatgcgcgtgtgatgcccccgagaatgcttccgtttaacgccggcgttacggcctctccgtttatgatgaaaaagatattcatactccctacctcttcggcatatttcttttccaccccgtcgagccaaagcacctgatcataccccagttcttcggctttccgctgagcctgtaagctggccgcataatttccggacgttttgacgtcgcccactccgccggtgacggcacgcacatactcatcctccacataaatccggatcggtttcagctgatcgccgtaatacgaaccgacaggcgtcagaacaaccatgaacttgtaacgctttgacggccggacgcctaaagaaggctcagtcgcaattacaaacggacggatatataaagaggttcctttttctatcggtatccattcctgctccagctccaccaattgtatcaatgcctccagcgccagcttctcgtcaagaggcggcatgctcatccgccgtaacgatttattcagccgttttatattttggtcaggacggaacatcaacacccgtccgtcttctgacctgtaagccttcagcccttcaaatacggcctgcccgtaatggaaaaccgatgcggaaggatccagatgaaccggttcataaggggtgattctcggatcatgccaccctctctcctcttcgtaatccatgacaaacatgtaatctgtgaagtacttgccaaaccccaatgaagcggagtccggtttttcttttcttgctgtgaccttacgtctttcaatcagttgattcaacaaaagcacacctttcttataattgttaaaattttcagtcttttataagctgcctgttttctctgcctgaatcgtgtatgcacagatatatgaggatgcagttgaccgtatcatatcaaatataccacttataagaggataattatcaaaatttttgatattttcaagcgaaaatatctaactttattttattctgcttgatttttttcaatgaggactttctgtcatattaaatgattgcgcttacataatgtaaagcaatcctttctttcgcacagtcaatcatgtgacaaatttatggcggataggaaggtggttgccgcctgcttcacgaattacgtatgaaatgcgcaagtaaaagggggattcgcttgaaaaaatttatcgcattccagattttgatcgctttagccatcggagcattgatcggccatttcttcccggatttcgggatggcgctgcggcccgtcggagacggatttatccgcctgattaaaatgattgtcgtgccgatcgtgttttcgaccattgttatcggagccgccggcagcggcagtatgaaaaagatgggcagtctcggcatcaaaacgattatttggtttgaagtgattacgacgcttgttctggcgctcggtctgttgttggcgaacgtgctgaagccgggagtcggacttaacctctctcatcttgctaaaaaagatattcacgagctttctggctatacggaaaaagtagtcgacctgaaacaaatgcttcttgatattatccccgttaacatcattgacgtcatggcgaaaaacgatcttctcgccgtcatttttttcgcgattttattcggtgttgccgcagccggcatcggcaaagcctccgcacctgtcatgagtttcttcgaatccacggcaaatattatgttcaagctgacgcaaatggtaatggtcaccgctccgatcggcgttctcgccctgatggccgcctctgtcgggcaattcggaatcgcgcttttgcttccgatgctgaagctgatcggcactgtgttcctcgggctgttcctgatactcttcgttctgtttccgatcgtggggcttatctttaaaatcaaatactttgaagtgctgaaaatgatttgggatctgtttttgatcgctttctccacgacaagcacagaaaccattctgcctcagctgatggatcggatggagaaatacggctgtccgaagcgggtcgtctcctttgtggttccgtcaggtttatcgctgaactgtgacggctcaagcctctatttatcggtgtcctgtatttttctggcgcaggcgtttcatgtggagatgccgctttctcagcagcttctgatgatgcttgtcctcgtcatgacaagcaaaggtattgccgccgtcccgtcaggctcactcgtcgtccttctggcgacagcgaatgccgtcggtctccccgcggaaggcgtcgccatcattgccggtgtcgaccgcgtcatggacatggcgagaaccggcgtcaacgtgcccggccatgcggtcgcctgcatcgtcgtgtccaagtgggaaaaagcattcaaatataaaggacccgtcacggcagaccagaccgcccggacagaaagtatgtaaacacaaaaaagaccaccttattggtggtcttttctattaatcaatcgccgcatgatcctctttctcaatcaaagcaaggcgttcattgatttcttcctgagtcatttcgtgctctttcacatacatgttgcgttcgttcgtacggcattcgtgactgcagctgcgcatgtatttgtattcattctcaggtgtgcagatcatttttttattacatgccggatttgcgcagttcacataacgctcgcacggttcgcccgtgaaatagtcttttccgatgataacgtgctctacgcggttgaccggtacgctgattctttcgtcaaacacgtagcactgtccgtcccacagctgccctttcacttcaggatctttaccgtaagtgacgataccgccgtcaagctgggacacgtcttcaaagcccttcttcagcagccagccggaaaatttttcacagcgtacgccgcctgtgcagtacgtgagaatttttttgccttcaagcatgtctttgtgctcttcaatccagtccggcagctcacggaacgcctcaatatcaggtctgaccgctccgcggaaatgaccgaggtcatactcatagtcgtttctggcgtcgatcacgatcgtgtcaggatcctgcatttgctcataaaagtctttcggtttcaaatgcttgcccgtcgtgacattcggatcaacatcatcttcgagacgaagcgtcaccaattcttttttatggcgcacaaacattttgcggaatgcatgtccgtcagcctcgtcaattttgatcggcatgtcggcaaagcgcggatcagctttcagcgcattcatgtattgttccgtctgttcaaccgttccggacaccgtaccgttaatgccttcctcagaaatcaaaatacggcctaacagaccgagctccttacaaaacttcaaatgctgagccgtgaactcctcaggctcatcaatctttacatatttataataaagtaaaactctatattgtttttccatgatttatacaccctgttcaattatattaatgatcgcacactctactatatcatacaggaaaacgggcgaaagatgaacatttccgtccgtactctttcttccagtcacgcttcgccttttaaaacctgctgaaaataaaaccgatatgtgttgcgcaaaaaggtctcaagcgaaaggccggccgcggtctgatacttgccgataataaacggaaaacggtcacggccttttgcccgcagaagatcggcgctgtcttcagccagttctgagatgagcgcctcaacgacaggccggcatgcgtcccgcacggcttcaagaacttgctgatcccctgtatgccggtactgttctatcagctttgccaaatccttttcttccataatgttcacttccttacaccatataaaaaagaggagcagcttttataaagcggacgcctcctcctgtgactccgcataaccgatgatctggccgacctgtaattcacggccttcagtcaggttatccgaaggggtaaacatatctttctcgaatactaaaataacggtcgatccaaatgaaaaatagcccagctcttcccccgtctcaagcctgtttccggtgtttgtctgaacgatcgagttaatattcatcgcacctaccggaatcatgagcatctgctggtcagcacgggtcagctcgtacacataacggtaattttttgagagcacatctttcccgtactttaaccccatcgtattaacgggataggagcgtttccccagctcggccagcttctgatacgtgcagctgacgggagaatggaagcggtggtaatgtctcgggctcaggtaaagcacggcaaaacacccgccgttatacttgtgatcggcgcttttaaaccccgtcagttcggcgaacgaataatccttcccttttaccatgaaagtttgattaggattaatcatgcccaccgtctgaacgacgccgtccaccgggctgacgatggcgttcttctcttttgccacggggcggagattcaaattaatatcacgaatgaaaaatgacgccagtgaatcaaagtcagaagccgtgcgttccgtttcattccagttgatgcgatagtgtttggaaaacagcggaatcatcggcttgctcagtttcgattcacagaagtttttaatgagataagacgtcaatcgattattagtcagttcaatcaatgaacggtaaagaactttagcggcagtattaaacattgattactcctatgaattttcctatagtaataaaaataaaacaccataaaaacgctccgatggcggcgaagcataagtaggttttgaattccattctgccgattccggaaaagtagcaggtcacgtgtctgatgccggggatgaaataacctaaaataatggtgtacggcccgtacttcttcatccacctgtctactttctccatcctcttttccttcaggccgacccatttcccgaacttattaataaacggccggccggcttttctgccgatgaagtagctgataatcatcccaaggagcgctccgataaagctgatcagaatggagagcccgtaattcagcacgtttatatgagcgaagtagcccacaagcgtcatcatgacttcatccggaataggcaatccgataataccgagtgtcagcataagaaaaatcgcgatatatccgtaatcggatattaattgctgaactaattccatcttctgctctccaggttttcaggcgcctgttttttaaaatgcggaaatttaatgttgctgaccattaaataaccgagcgcgatcgttcccgcccccagaagaaaagcgttattgataaagctcaaaatgacaagacacatacccgcaaacggaatcggcatcccgataaacgtcggcagcttgctttgttcaatattaaatctggaaagacggatcatcccgcagatgctgtaggaaagcgcgattaaaattccgatgaacggaatcgtatatagtgaaacactgtaagcgagcatggacggcgccacgccgaacgtcacaagatcagcaaaagagtcaagctcccttcccatctccgataccgcgttcagcttacgggcggccaaaccgtcaaagaaatcaagaaacatcccggtgaaaataaagatcaccgcagagtgtatattatgatacaaaagggaatgaatcgataagagcccgcaaataaaatttccaattgtaatcatactaggtatataattcacagtttacacaaacccccaattaaaaccatatcaaatcggactgcgtatgcataaaggctccattttacggaaacataaaatgaaattctttcaatgctatcattcaaattcttttattatacagcatttggtgttatttgaacaatctaatctggtgatttttgttttttcgccgttcatattaaggtaagcaatcatggattcctctattccggattaccctgcttcaatattccatgccgcgatgcggattgtccgttcttgatgaatgaaaagccgtatgatgtattgttatttccttctccgtgaaatgagaacattacatataacgattgcggacataaaaagtttcatgaattcaaaagccggcacaaaacggcctcatacattatctcacaaccccgttttccagtatatagtctgccaaacaaaaaaggcgccttaccattacggtaaaaacgccttttaagatcattttatgtaattgataaatggctgagtgcttcggccgctctttccctggcttcttcaacggtctcagctgcagaaagcgcaaccgccatacggcgtcctactttcgtgacgggtttaccgaatacgcggacctgagtgctttttactgccaaagctttctccaaaccttcaaccgcataatcagcaagctcttttggcgccttcagcggacggcttgcccccggcgacagctgaatgatttccggaatcgggaatcccaagaccgcgcggacatgcagcgcaaactctgacaaattttgcgttacaagcgtaacgagccccgtatcatgcggacggggagacacctcgctgaaatatactttatcttcagtaaggaaaagctccacaccgaacaaaccgtatccgccgagctcgtccgttatgcttttcgcaatgtgtttcgcctctttgatctgctgttccgtcatatgatgaggctgccatgattcaatatagtcaccgtctttttgttcatgtccgatcggcgcgcaaaaggacgtaccgttcgccgcacgcactgtcagaagagtgatttctgattcaaacggaatgaattcctcaacgatgacccggccgtttttcactcggccgccttccatcgccatgtcccagcagcttttcagcccggaagccgagcggcacacgctttgcccttttccggaagagctcatcagcggttttaccacgcacggaaagccgattgtttccgccgcttctttaaattcttcatatgtattcgcgaattcatagccggcagtcggaagatgaagcgtctctgccgcaagccgtctgatgccttcacggtccatcgtcagctttgccgcacgcgcattcggaatgacgtgaaaaccttcttcctcaagcttcagcagctcatccgtcgcaatggcttccacttccggcacgatcaagtccggtttttctttctcaatgacttctctgacctgcgctttatcaagcatatcaatcacatagcttttgtgcgcggcctgcatggcgggagcatgctcatagctgtcaacggctacagtgacaaccccgagccgctgcgcttcaatgacgacttctttccccagctcgcctgatcctaataacaacatcttcttcgcctgatacatgtcctttggcccctccctttctataccccactcattataacggaaatattcaaaaaataaagacaagatagatgacaagctctatcctgtcttttgcgctgattcgagcgattcaatcgccgctgacacgtccttctcgcaatattgccccattaaacataacgattcttccgcccggcaggcgtgagaagcaatgcggcgcttggcttcctcatggttgtcaaggatgccgagatcacagaggctgacggggaaaccgagccggaggtaaaacggaagcagctcttcaatctcaggtctccgattctcaagcgcgagctgcaccaatatgccgtaagcaaccttctggccatgcagcacctgatgtgtctcctgaagaaaactgagtccgttgtggaccgcatgcgcccctgccatcctgcacaaacggccgccatacccgccgaccgttcccgcaagcataatgatcgtttccgccgtatggatgaacggcacggacagctcgcctttctccatgcttccgacggccgcttcactgtaacgcaataacagatgacggatatattccgcctgtctcagccccgcctgcgccatcagcggcgccgcctcctccgtatttctgatgaccgcctcagcctcataccatttcgccagcgtatcaccgatcccgcttttcatatattcaatgggagaggaaagcaaaaacagcggatcaacaagcgtcaaatagcttgaacgcttatgataatcaactctgataaaattgccgctctcatcatatatgacactcaacggcgtacttgccgcacacgtccccgcaatggaaggaaccatcacagcttcaatatcaagccggtctgccgccgcttttgccaaatccaaaatcgtgccgcctccgataccgatgatcacatccgcgtcttccgcctgctcacagaccttacgcaccgcctcaggtgaacagtatcctttatgctgaatcacatcccaggaagaaccgccgctgtaatcggagaacgcctgataggatttgattccggtcacaataacgggttttctgaatgtctccagcagccccggaagttcttttgcgattccttccttgcatatgtactgattcgggccgcttcggacgatatcttcaggcttcattcgaatctctcctttggctggaatttatatatattttcccacttatcagaaaatacatcaaccggaggtgcgtcagcgcttcgcttcttccgcctccaaaaacagctcatcaagccgctccaaagcctctgccttttcaaaactgctgaaccacagatcatcataggaatcaaggatgcggtaatggtgggaaatcaaatgctgctgcaagcggaactcgccttttttctcgatggctttccaccacaccttgccgcccatcgtcttccccttcggcctgtcaattgtgcggtgagcaaccgtttcaatgacttccagcggatcatctcctaatacggattgcagtgtttcacttgatctgaaaagcgcgcaaaccgccacaacgtgcggccattccgcaagcgcccgccctttctcaatctgcaccagcgactttttagaaaggccgatcacgtccgccattttctcttgcgtatagcctctctccgaccggattttcttcagctggaccgagacaagctcagtcatataatcttgatccatctcaacctccatatttatcaatatagccattttacaccgcggcacgccttttttatatcagaacattttcaaacgaatcaaaagaacccgggattggcttatcattgaagcgatgtacctttccgcataatccagaatgatgcggtgaatacaaacgtacgcccgaatagacaggtgcaggctccctggcggttgagctccggacaaaataaaaagctgccgcagctgcagcagctaaaactttatagaccggaacatcagcattatgaagcgaatacaatccatcttgcactataattgacacgttttttcgaaccctgattgaccattttaaatctgtatgaatctcctttttttaacgaaggtgtttcaaaataagtcgttccatttttctttgcattggcggttttgattgttttccaggcacctttgccgttgacttgcttttggacgtatattttatacgtgcccttccctttactgttggatttaaaagtcacggctctcaaggtgtacttttttgtcgttttagtgaatttagggtgatatgtattgatcacatagttagtgaaatacccgcttttataagtatgaagccagtctttagcctctgctttttgcggagaagaaaaacccataaaaccaattccgctgattaaaagagtgaaaataatgatgagcgacttaaaaatctttttgcttttcatcgagaaaatccttccttcctgtaactatttaccctatttatgttaatgacaatatagccaatcataaatccgtccaactaaccattttgaccgcaggaagagatgtgaacagcccttaaaatgactatatgactactacttatgattcttgttatttttgattaagtgataaagttactttaaaccgctattcattttgttgtttttatatcaattgtcatagcgaggtcttttcctatcaatgcctctctttcggcgtttgttctgcggctgtatgatggggctctccttggataaactcctgcacccatgacaaactgtcatacgtttgccacctatgaatgaacgcacactacacgcaatggagggattacaatggacgaaatggtcctggaaacacaacaatggctgaatgagacgtacaaaggcagacacgggtacaacaaagtgccggaaaacggaaaaacgggctgggataccatttacggtctgacacgggcgcttcaaattgagcttggtatttcagaacctgccgataacttcggaccgacgacacaaagattgtttaagccgttgaaaaagcaggctcccgattcaaagccgacaaacatgaattacattctgcagggggcgctgtggtgtaaaggttttaaccccggcggattttcaggcgttttctatgaaaataccgaaagcgctgtaaaagagtttcaaaaagcggccgggctcactaagcaagacggcatcgtcacggcactcattatgaaagccttgctggatatgagcgcttttcggttagtagcggggggcgacaaaagaatccgccaaatccagcagaacctgaaccgggattacaatgactacatcggcttgatgccttgtgacggcttatacgcccgcgatacaaacaaggctctcatttatgctctgcaaaaagaagaaggcatgagcacaagcgtcgccaatggatttttcggaaacgggacgaccagcttatgccctaccttgactcccggcgattcacggacaggctttgttttgattgttcaatacgcgctttactgtaatggggaagcgtttgatcccggtgaattcgacggaaaatacggcgtcggagttgtatcggcagtgaaagctttccaaaagtttatgtgcctgccgcagaccggttatgcggacatgccgacgattaaagctttattatcaagctcaggcgacacaacgcgggctgcttcagcttgtgacaccgctgccattttgacagcagatacggccaaaactttgcgtgagaatggctataagatcgtgggaagatatctgaccgggaatgtgcggacaagcagcggactgacatcgaaagcgttaacgtcaaaagaactttccgcgattttcaatgccggcttaagcgtgtttccgatttatcaggacggcggctatgaatcttcttattttgtaaaagaccaaggaacgagagatgcgtacagcgctgcatcagccgcccgaagattaggttttccgtcaggaacgaccatttactttgcggtcgattttgatgcgtatgattatgaagtcacggataaaatcattccttacttccaagaaatcaagtcagcttttatgaaaatgcaggcgttctctactgcgccgaaatatgaaatcggggtatacggaccgagaaacatttgtatccggacgtcagaagcaggtctgaccaaatatagctttacggctaacatgtcgaccggattcagcggcaacctcggatacccgatgccgaaaaactgggcttttgatcaattttatgaaggcacgatcggaagcggagcgggaaaagtcgccattgacaaagacggatactccggaaaagactcgggtgcaagcagcgtccatccgccttctgatcctgtgtatgatgcaagactgcgcacactgacggatattttaacaaccattcctgctttagaaaatatatcgaatcttgcgaatgccatgtttgaattcgacaaaacagaaaccatttatgcatcacctgaaatggatattcttttatctacttcacttttggcaacagtgccaagcgaaggttctcccaacacagttaccattacaaatggcaaaccgggagcctatattaccggtctgatgggagattcacaagtctcttttacagcatcacaaattgattcctatcaaaacctgcttaacagtctgagcttgtcagtccgcaacggttatttagaagtgtatgtcaatccggctgcgggatcgctgaatattcaatttaaaatttatacacctgatattccggtcggtgacagtgctacaactggactaacaactaccattacatttaaaataaaacaaaagagcttcaggttgccggattccgaagaagtttactctccggattgggattctgtcgtgaataccatggctattgcaggcgcaggaattattgttattgtagggatcggtgctttagtcgttttagcacctgaattaggaggagctgcagccttgttcagcacggttttatcactatttctataattgaacaggcagctccttgctccaggaatgctcaatgagtattcttggagttatttctaaaggaggattcgcatgaagattgatatgcagacatacaaggaaaccgttcaaaaaatagaaaccgatttgattccgcgaagtcaaaatgacgaagaactgcttacatacttaatgaaacaagattcgctcacactgaatcaaatgaaaatgtgtctcactgaaccgcccctcaccttccaacatactgtcaaaatcgtatgtacagtcacattcatcacgttatatatcttttttttcagcactcattttaatgatttgattgaaatggctctgcagatggttttcggcctggccggccttgtttggattattgctgtatttccgttttcaagaaaaatccaagtgtctgaccgtttcagacaaaaatctgaaaacacccgtatcaccggaatgatagactttgtcctcgaacaacgatacaaagacatgatcagttaaaacccctctgcttaaggggttttttattatgcaatcccttcaccccccttatcaaaaaaggctcttctcctttggaaataaccggaacacccaatttcgttttcaatataatgaggtagtggatccgcaaagaaagaagggcgacatgatgggtatcattaatggcaaaatgttcattgaccgattaaatcagcttggaaatgagatttggcttgatggtgaaaagatcgagggacagatttctgagcatcccgcatttaagggccttctggaaacgaagcgctctctttatgatttgcaaacgaaaccggatatgaaagatcaaatgacttacagtcttcccggtaaaaaagaacgggccgggctttcatacctgcagccgaaaacgaaagaagacgtaaaaagaagaagaaacatgttcgaacattgggccagacacacgcacggaatgatgggacgaagcccggattatatgaataccgtgctgatgagcttcgcctcctccgccgcgcttttgaaagaccgcgagcattgttttccggaacatgttcaagcgctgtacgaacgcgctgctgcacaggatctttcttttacgcacacgtttatcacccctcaggtgaatcgttcacaaatgggtgtaaacgtatcgccgacacctatctcggcaaaagtcgtcgataaaaatgaaaaaggcctcatcatacacggcgcccggattttagccacacaaggcggcctgacggatgaagtgctcgtggtttctctgcctaaaatgtattttgaatcggatgaagcgttcgctttttcaatcccttccaatacaaagggagtaaaattcatctgcagggaatctttcgtactcggaaaatcatcgtttgattatccgctcagctcaagatatgaagaaatggattctatcgttgtatttgatcacgttttggtcccttgggaacgcgtatttttttataataattacgaggcggcttttgattttaatatgaaaagctcttttaacgccttcgcatttcatcaagtcatcacgagacaaattgtaaagacggagtttctcctgggcctcgcccaaacgcttgtcgaagcgatagatgtgggcgaatatcagcatattcaggctaagatggctgaaatcatcaccggtctggaaacgatgaaagcccttttggaaaagtcggagaatgatgcggaaacagatgaatggggttatatgcgtccgagtgtcactccgcttcgtgtggtcagcgcgatttttcccgacatctacccgcgcttcacggaaatcattcagctgatcggggcaagcggaatggtgactttaccgactgaaaaagcgttccgttctgacatcagaggagaccttgaccaatatttgcaggcggccgaattgaacgctgaggaccgggtaaaagtgttccgcctcgcatgggatttgaccatgagccccttcggaacaagacagacacaatatgagcggtacttcttcggtgaccccgtccgcttaaccagccatctgtacagaagctatccgaaagaagaacagaccgcggtcatcaaggaattcctgcacattcataaataaaacaaagcagagagcgcatctctgcttatgatagctggatcggctgccgccgatcctattttttattttggctgatcaccaccatcgtaatatgcgataacgcgaaagagacaagcgtatacacaacggcccacccgataaacgagaaattcaatacggtaaaggtgcatataaggcaaacggccaaagcggcagccggcataatgaacgcgtttttaaacaggtacgttccggcgactgacaagatgatgatacaaagcggcagaacaccgaacgcaaaatccaattcatcaatcaacagatgcactcccttcgcttttcttagtgcggcctaacacatcttatgcctgagtacaaaatcgagtacttcaaatctttcgcgctccggctgattttccctccggttatttattcaaaaaaatgaaaactttccttaaagcgtttacattcacgtcagactgtgataatttaagaaagcgctatcatacacaagttaatgatttttggatggagatgaggagaaccaggaaaccccgccctttcacaagggtgatttctggttctttttgtcattttcaaggaaaggagtcatacatacatcatgatagacgttcagcaaaggggaggatatgatgtttcaattgtttaagccggctccgcatattgagagattggatgattcaaagacggatgcggcctataaacggctcaggctgcaagtatttttggggattttcatcgggtatgccgggtattatttgcttcgcaaaaactttgccttcgctattccttattttcaggaacaagggttttcaaaaggggaacttggcttggtgcttgcggccgtatcaatcgcttacggcttcagtaaatttattatggggatggtgtctgaccgctgcaacccgaggtatttccttgcgacgggtctgtttttgtcaggtgtcgtaaacattttatttgtttccatgccgtgggtcacgtcaagcgtgacgattatgtttatttttatgtttattaacggatggtttcaaggaatgggctggccgccttgcggacggacgatggctcattggttttccatcagtgaacgcggcacgaaaatgtcgatatggaatgtcgcccataacataggcggaggtattctcgccccgctcgtgactctcggcatcgccatgtttgttacttggaaaagcgtgtttttctttccggcgattatcgccatcgtcatttcatttgtgattgttcttctcgtacgggacacgccgcaatcctgcgggcttccgccgattgaagaataccggaatgactatccgaagcatgcgttcaaagaccaggaaaaagagatgacgaccaaagaaattcttttcaaatacgtgctgaataataaatttctgtggtatatcgcatttgccaatgtctttgtttatttcgtacggtacggtgtcgttgactgggcgccgacttatttgacggaagcgaaagggttctctcctgaagattccagatggtcttatttcctttatgaatatgcgggaattccgggaacgattttgtgcggctggatcagcgaccggtttttcaaaagccgccgcgcgccggcaggcgtactgttcatggccggcgtatttatcgctgtattggtctactggcttaaccctgccggtcatccgctcatcgataatatcgcgctgatcagcatcggcttcttaatctatggacctgtcatgctgatcgggcttcaggccattgaccttgcgcctaaaaaagcggcgggaacggcagccggcttaaccgggtttttcggctacatcggaggctctgctttcgccaacgccatcatgggttatgtcgtagaccgctttgactggaacggcggctttatcatgcttatctcctcatgcgtgctgtccatcgtcttcttggctatgacgtggaatacgggcaagcgggcggagcatgtgtaagaaaacaacataaaagattaatatttttgcagtacagcatttacaacgattttctacgctagagacagatattgatttttaagggggaagaaaacatgcggaaacataaattgtttgctttggtattgctttcattcggtttattgtcattcatcgtcacgcctgtatcggcggcgggaaaaggaaacctcttgtctcctgacagaattttgaccattgcccatcgcggtgcttcggggtatgtcccggagcacacgatcctttcttatgaaactgcgcaaaaaatgaaggctgactatattgagctggatttacaaatgacaaaagacggcaagctgatcgtcatgcatgatgaaaaactggaccgcaccacaaacggacaaggctgggtgaaggatcatacattagccgagattcaaaagctcgacgccggctcttggttcaataaggcctatccggaaaaagcaaaaccgcaatacgccggacttcgcgttcccacacttgatgacgtgttaaaacggttcggcagacatgcaaactattatattgaaacaaaggcgcccgaaacatatccgggtatggaagaaaaactgatcgcttcactgaaaaaatacaaattggcaggtaagcatgcgaaacttggacaagttatcattcagtctttcagcagggacagccttctgaaaatcaaacagctcgatccgaaacttcccgccgtccaattgcttgaagcggaacagatgacgtcaatgactgacgcagatttaacggacattaaaacatatgccgtcggaatcggaccggattacaaagcgctgaacgctcaaaatgtccgaaacattcgcagccacggccttctgcttcacccttacaccgtaaacagcgaggcggacatgcgccgtctgctgaattggggcgtaaccggtgtgtttaccaactatgcggatatatttaattttgttaaatctaatagggatcaataggtttacgaatctaaagatttcaaaacaaaaactgcacgtatatcgcgtgcagttttataatattaattttaaatatttctccctttaaataacggtcttagtatattcttaacttttgctttaatagatttgcccttataaataacaggaacactttgttgcaaatgaccaataatcacttctgcattcttttttagcttaatttgttttaactcctgcttagttacttcaaaactaaaatcatatgacattttttttcgagtagaatctttaagtaccacatcaggtttaaacataagaaaccttccaaaattaacctggaaagaattctgttctccaaaacttaaatctgtttcacaatcaaaatgtcctttaatcctaggaccgctgcaggttaacacaaagtttttaaaatgtaacatttgatgtttaacaacaagagaaagattaccccatttagttagatacgagtttataacgataggttctttacatccttttgcaatataagaagcattttttaaataaacgctttctttcgattttaatctcaatgatttcgtataatcttctatcttactaattaatcttaaatctaatataccatcttcgctatttaagtggagcaaagattctataggtatatacgcgtgaaaataagtgattttttcttttgttataatttgcgtatctatttcaaaaggatattttttttcaaaaaggcttctataagctggaaatgaaattgttttatctttttgttctctcaaagagacttcgataaataaacgctcatttgaggagtcaacatgtgaatgataacaaaaaccctctaacaaaacggcattctctaatttctctatttttgttatttctccttcaaatttattattacgatgaaaggaaatagactcatgcaaggccaaattgtatgctaattctggttttggatagacctttccatgttgtactaccatgttaccaggttgtttttcagcgtaccagaaagaaattaaatcctccaattgtcctttctcaattaaacgtaataagagtttatggcgggaagaaaactgctggtagtaatctaagtattgatacttgtcaagcattttctttaatttattaaaaataaagattttatcttcaattagaaaagactttgaaatcagtgcgcttaactccacttccataatcctttcccagtaatgaaagaaaatcagccgttttttatctatttcaaggttcagtaattcaatagatgccaatgtttcttcgattctgaacataaaactttcacctgataatggtttcttagtaagttgaacccttcctattgtttgatgattggtcaaataataacatgggtaatctttaacaagggctatggaatttgaatatgcatacgcttgaatcataaacggttgatcttctcctagagagaagtgttccggaaaacgaatattatgtttaattaataactcccgtttaaatagtttttgagcactcatcgtaaaaagagcattggaaccagggaaggaaaaacaatctggattctttttaaatacagccacaggaacacctctattaattccttcataacggccgataattatatcactttgatactgaactattttttcttccatcttttctaaagcttcaggtcctaaataatcatctccgtctagaaaataaatataatcacctgttgctgcttctatagctttgttcctcggtctgccaggtgcgccgctattctgctgatgaattactttaataaacttgtacttgctcatgtattcatctaaaatattaccgcttttatcagttgaaccatcatttacacagataatttcaagtttgtcctctccaactgtttggttcaccacgctatcaagacaatctctaattgtgttttgatcattataaaccggaatagctacagtaaatatcatcttttttctccttaattattttttcctatataaaaacaagtccagaattattcgattccaattttaaaagtttaccataatttctttcttttataaatatggttaaaaattttaatgtgtttttaaacctagccaccgtaatctagataataagatggaatatttccagtaattaaatcggattccataaggcccctaacaaatgttcaaaataaaaatacattagtacaggctttgattcattttctctttgaatttggaaagctcacttcatttaatcctaattacgatactttgcggatttttaatttcacccatgaaaaaacacctctaagtcgttttcaggtattatacctgcttttcaacttaaaggtgcctttgtcctgcgcttacaggctcagactctcaaaaacttcaactttttataacttattcttttccggcagcggcttcagcctgtccgccttttaattgatcgttaattgctttggcgtctttcaaatactcagtcttgaagccgctcttcagcgcccacgcatagaaggcaagggcaacgattgcgatcagccccatatcccatccgtacggaatgatgttcagaccgccgaatttttcacttccgagccatgaaatgaccatcatgctgagcagatagacaaccatccagacgccgcctttaaagtttctgcggaatcctttccacttcgctttcgcttggtagtagaaatatatcggaaggccgatcaaaatgataaacagcacctgccctgttaacggccagcgcgcccaatacagcacgagagacgcgaacacgaagccgagcggtgcaaccacgctgaggcctttcagacggagaggccggtacaaatccgccgccgtccgccgcagcgtcatcaccgtcacgggacccgtgatataagaaatcagcgtcgcaacggaaatgatttcagcaagcacgccccatcctctgaataaaaacagaaagataaacgatatgatcaggttgaaaatcatcgcttggcgcggcacgccgtacagcggatgaagctttccgaaaatgctcggcatatatttatttttttccatgccgtaaatcatgcgggacgtcgtagcggtataagtgatacccgttcctgacggagatacgaacgcatccgcataaagaataatgacaagccagttgatattcaatgcgatcgccaaatcggcaaatggagagttgaagttcaggtgactccagccgtgaacaatcatggaaggttcaaccgcaccgataaatgcgatttgcaataggacgtaaatgacggttgcgaccaacagcgaaccgacaaccgcaatcggaatcgatttgccgggattttttgcttctccggccatgttaatcgggctttgaaacccgttaaacgcaaatacgatacctgatgtggccaccgccgtcagcacgctcgcccagccgttcggcgcaatgcttgaaccggatgtgaagtttccgccgtgaaaaccggtaaacagcagcgctccgattgtcagccccggaataataattttaaagatggtaatcaatgaattcgcttttgaaaataagttaactgtccaataattcagtaaaaagtaaataatcagtaatacagatgcgaagccgagcccctctcccgtaagagtgccgttgtgaacgagattacttgtccattttgcccattcccacggccatgagctcatgtattgaacagacgcaaccgcttccaccggaataacggaaacaatcgcaatccagtttgcccatcctgcgataaatccaataaatgatccatgagaatattgagtatattttaccattcccccggcttccgggaacattgaacccaattcactgtaagaaagtgcgataaacaaaataacgatcataccgataatccaggaaataattgcggcaggtcccgcaatctgagccgcccgccacgccccgaataaccagccggagccaatcatcgacccaagtccgaccatcatgagtgcaaacgttcccattctgcgatgtaattgattcataaagttaacacctttcaattaaaatatgactccagcgctatcatatatttataatattattctgaaaatagttttgtcaatctttatcgcattaaagcggcaagccaaaattaaccttccgatgtttaaacagccgttaagcgggaataactactgcaagccagaaatagaaaggagtttttatcgtgaaacaaaaactgctcatttcaggacttgccgtgtcgactgtcggagtgacttcctacctgctcaaagataaatcaaaccgccaaaaggtgatgaactttatccgcaatatgaaaacatcgctctccgggaagcaggatattgaatcattccccgtcaacaaagcaggcaacccgcatcccgaagatattgaagataacaaaatggtatccgaaggctccatgtacccggttcaatattatgatgacaagaagaaataatctgttcccgggctgcccggccgtatcaaacggcggcagcttttttatgcagacggcgtttgatagaaccgccaatattggcgcgagcctttatcccgcacggtaatgcccagtttggatatttccgctttcagttctttcgcatcagccttttcctcctctttcagcgccttttctctcgcttttaaaagagcatttgcccctggctccaaatccggcgtgtccggcacccaccgtttgtattcttctttaaaaggatcttccgtccccagccagacatacccatgcgcgcgaaacgcatcagccgctttttcaaccgccggctcaagcttctcccgaaaaagctcctgcccttcagtccccaataagacaagatgcttttcatccgtaaacacaccggaaatgctgtctttcgaaaacacgctttcttcattatatatggttaaggacacctcgctgtccgtcacgactgccacaagagtttctttaaaagctgcccgcgtcagccacactcccccgattaagccgataacggcagttgcagccgcagccttccatccgtgaaaagaagcgattatttccagcggcccgtgaaaaggcagccaatccaatgttacggcccacttcgcaatgaccggcagaaaccatccgatgaccagcccaaataatggcggcaccagaaaaaccaaagctttttcaaccgatgacaactcaagaaccgtctgtttttttatttcgttcatgtttctcctccgtctgtgtttttcacaactatccattatacaaagggttggatgattctgtaaactgtttccgaaacaataaaaagcctcccgaccgccgggaggctttttaaaacaggagctcatatacttcattcaattccatcgtgcgcttctcatcctgctcgttctcagcatatttgatttccttttcaagcagttgattcagcgcatccatttccaaatcatttagatctttcacaaactcgccctcatttgcataatgcttcacctgaagctttttataaatccctcggcacacatcatgctccaagtggttcgaaagcgactcgcgcaaatatccgagtgtcctgtccatcatgtaagccctcccttttctttaggaatagcttcccggaaagagagaaaaactatacatgaaagcaccgggcggctgttttaactctgtacctgaatggagaaaaatccgctgcttaacggcgtgtacggcccgttcagccccgttgcggagaaagagaacgttcctgaactgacataagaaagaggaacgctgtaatatttaatatagcctgtaacgatattgccgttttttgtatattcatcttccagcgcttttgacgtaagatttgtaatattcgttccgttgttaaatgcctggatcgagttattgttcggatacccttggaaatatacggctaaataacccgttgtccccttcatcggttttgatgcgctgatttggttcggcccgatattttcccattggtaattctgaccgtcagacgtcacaccgataatacggatttgtgttaaagcaggagccggcgccgcagacgctgacggagcccacaacccgctcacaagcaacaaagcagcggcggccgcggcaaatagcataacgagtctctttttcatgtttcttcctccctgatggttcaaatttataattatgttaaatattataagttttattttatcagagaaatcaatagatagacagaatcaatcagtcaaattggtgaactttttatataaaaaagctatctcctaaaggagatagcttatataacattatttctttccacactccaaaattgtgtatttactcggggtctgaattacatttaatagtgttaatccggctttctcaatcaattgttcaaactcggttttctttctgactctgccgcctgcagagcatactaaaaataataaatcacgaaaagcttcttcaggggacagcttgtctgcttcaggcacattttcaactataatcagcttggaatgatcagacatggcaccggctatattttcaagaatagcaaccacatgctcatcatcccaatcatttaacactttgcttatcacatacaagtctcccccggaaggaatttcctcaaacatactcccttccgtaaactgacagcgttcgctcatctctgaagatgctaaatgcttttttgcactttgtatcgtttttggaagatcaaacaatatcccctttgatttaggagcagcacctaaaatgcctgttattaactggcccattcctcccgcgacgtctacgataacatcaaacttttcaaatgagtaagctttcaatatggatggcagactcatttttgaataaatctccatcgccttatccattgtttttaagtaatcttgatcaagactattattctcataccatttatcgccataaatggcttcaaaagcggatttgccggttttgatactataatccattttaaacatagactgcactactgtttcatgcagcagatattctaccaaaggctcaatggattttgctttcccaggcatcaaagtggcaccatactctgttacatcataatagccattttgagcttgggcgaccaaaccgacggattccagcgctcttaagagcctgaataaggcagaggggttcaattcaagggcttcagctatcgtttccgctgaagctggtccattttgaaaagcggaaaatacatctaattctaccgctgttttaactgccagggaaaaccccagccctgaaaccatttgcatgactgcggcctgaggatgtttcttcggtacttgtttatcttgctgaactgaattggtcatttacgttaacctccgattaattaaatggtttctgctgcttttttgatataatgcatatactgattgagcagattttctacagtactcttatggtactgattttgattatattcaattccaatgcttaattttttctctcttaccaacacaataaacttaaacttgtaattccaaatttcatcttcacttatatcattcccggttgaaagcggagagaccgtaaagctttctgtgtgcagttcattatcaaattcgcccatataattaaatgaaatgtctggttttgatttctcttttataccttgttttaaatatcttaaaataccatatcctatcccttgatcaggaatattggctaaggtcgagttaacattatctaaactcgaaccgatatgatctgaatcggagacctccaaagccactggatagattgcagaaaatctgcctactgttctgtagatattaagcttctcactctgatgagtgcggccatggttgcctaagtgcacgagagatgtattactgcctgtttgatgttttattgtcaaacctaaagctgtgagcaaaacagtctcaatagtgaaatgatcttgtccttgaatcgcattcattatattttcagtttcccgaacattaaactgcctgtatacttgtctgttatctttgactttggcaatttgcccctgaatatcaaccggaatagacggagcataaacattttcgatttttgtccaatactctttctcaaacaacagccgttcactttcagcatatttatagagataatcagaccattttaaatacgaatcggttttatttggtaatacaatgtcttcgttacttttaacttgctgatatgctgtattaaaatcttcaagcagtattctccaagacatatgatcaattatcatttggtgaatgacgattaacagatgttccccatctgcttccttaatcagtgccaatttaacaagcggtccgtgagtcagatccatactggcttgtatttgatttattttcatttttaaatctgattgcggcatgtttattgcattaatcagatgaaagtcaaacaagtcgccgtccgtcaggcctctgattacctgtaccattctatcgcctttacgtttgaatactgttctcagactgtcatgatgctgaataatccgggtgaaaatgtcttttacaatgtcttcgccaaacccggcttccctgtatagcataaaagaaagattccgatggtgcagagtatcattatggcgttcagccagccagcattgaattggcacaagaccggcttcccccgttatcacactgttatcagatgccgttgttatataactgactttattcgaaactccttcgattgtctggtaatgaaaaatgtctttcacttccagcctaagattgaatttttccattctgaccgctgcttgtatggctttaattgagtctccgcctaaaacgaaaaaattatcttttatactgattttagaaacttcaagaatgtcggaccagacctcactgacgattcgttcaatctcgtttctcggagcaataaagtgatgcagctcggcattattttcagctggtagcggcaaacgttttacatcagtcttcccattgttcgtcaacggaattttatctatgcccataatgactgtcgggaccatatattccggcagatattccaataagtattcttttagctgagaaggcggctgcgtatctttacatactgtataggcatatatctgatcattgtgagcaatcgcaaccgcttcttgaacattttggtgagacagcagtctgtttacaatctcatccagttcaattctaaatcctctgatttttacttgacgatcgattcttccggcaaattctatattcccatcctcattccacttgcctaaatctccggttttatacattttctcaccagaatgaacaagatccgggataaacttagcctcggttagttcttcacgattgcaataaccccgtccaactccttcccctccgatgtataactctccgataactcccggcggcacaggcttctgctgtttatctagtatgtagatagaacagttttttatcggcgtgccgatagggatcctctttatattggaaatattatctgggtttatcgtataagatgcagcatcaacacagcattccgtcggtccatatacatttgttatataaggacggtcattcttcttaaatactttataaaaacgctttacttcttcaggtttaagcacttcgccgcctataataaaatgttttacacctatacggccacactgcggagactcagagagcaggctgagataggctggtgttccatcagaaatatttattttattttggatatagaactcagcaagtttcgtgatatcatgcctggcttcttcagagatgatgtaaagagagtgtcccaaaagcagcgcagaaaaaatctgtttgacagaagcgtcaaaggaaaagggtgccaacaacgctacattctgccgcccgccatgtttgccgtagatacgttcatgcagggcttctgttaaattcactatacttttatgttcgatcatcacaccttttgggtgtcccgttgatccagaagtgtagatgatataggcaaggctgtgccgttccgctcctcctttaacatttctcccgtcgtctggaactgtttccaattcattcagacaaacactttctactccgtacctttgacaatgattgttacgatccgtcagtaacaagcgggccccgctgtctttgagcatatactcaactctttcttgcggatatgatggatcaattggcagataagctgctcccgcttttaaaattcccattactccgatgataaaatcagtggttcggtctgcagctatgcccactgcttcattctttttgatacctttttgaatgagtgctcttccaagccggtttgcatttttgttcagctcactataagttaagcttccgtcttgtgcagacacagctatttgattcggcgttgcttccgcctgcttctcaaaaagctcacagatagatgcatctgcgcctctgcttctcagtgatcttccactgccactgtaactcaacatctcgcgtcgttcattttcttctaaaatgttaatctccccgattagtccatcttgactttcaacaatatgattgagaatcattaagaatcgatgtgagaatttttctacagttgtgcgcttaaacaagtttgatgaataagtgaactcaaacttgatatcctcttctgaaggaaatgcttgaagcaaaagatcaaatttggctgttttgttttcgtaaggatacggcttatatttcagcccatttacttcaattgccggattatccatcagctgaaggacaaacataacgttgaaaagagcattctggtttatatccctctcaaggttcaaatggtctacaagctcttcaaaaggataatcttgattttcataagccagaagcgcattatccctaacggcttcaagcagttctttgaatgttttgtcggcagatggtttatttctcagtgccagcgtatttacaaacattcctatcatgttttctaattctttatgctttcttccggctacaggtgtgccgataataatatcttcttgaccagtaagtttatggagaagcacattaaatgaagccattaaagtcatgaaaagggtgactttttgttttgcgtttaattcttttaacttggcggtcagctctcttcctgcataaaaatagattcgttcaccttgatcatctcgttcggcttctcttgaaaaatctgcgggcagattgagagcgggaatttctcctttaaactcatttaaccaaaaatctttttgttttttcatttcttcagtatgaaataattcattttgccatttcgcaaaatctttaaattgaatgttcaatggcggcagttcgttgccttcgtataaatttatcaattccctttggaggatcgggatagacgccccatccgctataatatgctgtaaatctatcattaaaagatgtttttgatgactaatctcggctaatcctgcacgcagtaaaggagccttttctacatcaaacgggcggacaaaattagccataaggctctctaattcttcgtcggaggtcttgattctatccattttaaatcgaacgtctttttctatgttttgcacaagctgcccgtctcttaaaactatggacgttcttaaaacctcatgcctgattattaattttttaaacgcatcttctaaacgtttatcgtccaactctccttcaatcattaaaaagaacgggatattataagaagtgctgtttttatttaattgatctagaataaaaattcttttctgtgcagatgatgcctcataccactcaaaatcgcctgctttgggaatcacattcacatcatttgtcttcctcagagaatattcatccaaataagctgaaaagagttttatattcgaatgctttagcaagtctgaaactgaaagctccgttccttgctgtttattgataaagttgatgatttctattgctatgattgaatctccgcccatttcataaaaatcggatgtaacatcgatcggattgattccaagggcatttccccaaatttgtcctgccattagctctgtttctgaataacagccgtcttccctgccactcagtcttattatttgaggcttgttgactgaggggttatctagtgcattgcttatcggtaatttttcaggcagtttcacccaatgtctctcccgcaaaaatgcgtaacccggcaagctgatttttcttcttttttctccttcatatatcatttcccaatcgatctctgcacctttttcatagagcttgcttatatcaatcagaagactctcatctgttctcccggctgcattataagccttaagtttttttccagcagcggtacttagatctctatcggtcttaaaagaaaatgcagcttcttcttgctgaaccggcgcttcgagcagactttcaagttttcccttcagatcttcgatgtcttttacgagaaaacacactctattctccaggtgttttcttcccgtattcgctgtataacaaagatcagagagatttaaattgttttcttccgagataaaatgaagatactttgatgcaatatcattcaggacggacttattttttgcagacagagtgaatacctcttttacctgtctctgttcagtctcacctattattccaggtgcttcttccaatacaatatgacagttggttccgttgaagccaaacgaacttacaccggctcttcttggcgtctctcctttttcccaatttcttatcatgtcattcacataaacaggtgaattcgaaaaattaattaaaggattcggttcattaaagttgatacttggggggatgaccttctcttttaaagccatgcatgctttaatgagagacgccatgcctgatgccccgactgtatggccgatattgggtttgactgaacctataccgcaaaactgctttttatcggtatatttcttaaacgcattcgttatccctttgatctcaatcgggtctcccaaaatcgtgcctgttccatgcgtttcaatataagaaatagtttccggactaatattcgcattcttccaggcacgcgtaatcaatttctcttgtgattcagcattaggagcggtgattccgttagaagccccgtcattattcgtagcgctccctttaatgacagcatatatgtggtctctgtcttctattgctctatgtaaaggttttaatacaatagcagaaatcccctcaccccatgctgtcccctttgcatttttatcaaaaatgctgattttagcgttttccgcttctatctcgctcatcgtacctatattttcaggtcttagaaataaattaacgcctcccgctatagccatgctgcattcttcatttttaagtgcctcacaagcaagatgaaccgaaacgagtccggaagagcaggctgtatcaacaaccaggcttggccctttcagattaaaaatgtaggaggtcctgcttgccaatatgccgggataagtacctgtcattgcaatcatatccgcatcatttactagggaagcataggaaaacttcaagtcaccgctatgatcatgtccaacgaaaatacctgtattcgaaccttgtaacttgttcccagcataaccggagtcttcaatagcgtgataaactgtctccaaaaacaatctttgtttcggatccataagcatggcttctcttggcgaaattctgaaaaatgatgaatcaaacttatcaatttcatctaagaaacccgctttaaaataagaattctcattcgcactgggcagcaatggatcaatatctttccgccgcttcttcggtaagtcccggatgcatgaggcacggttcataatgttttgccagtattcttttgcattattggcttttgagaaacggcaggatatgccgataatggcaatatcacattgatttttcttggacttatctgataatcctttcaaaatgcgcaaagccatttccctgtccattttttgctcttttacttgctccaatacatattgttttataatcgaaatatcatccacgattaatcacccctatcgattttgattctatataaaatatgagaagcatcatggatatatagaatagctgcttcaattgaagaagcagcttattgaattagttaatttttgtctcaaacacctttccatcttctttacataacacctgcactagatttcttgcctgtaagacaacactcggaagacctcctcccacttgactccaatgcccaaccatataaaagtctttaagtccgggaagtgaacgtttcagttttttctcgtgtatgatgccttccatctgtttttcccagccctgccagcttccatttctattatttgtgtatcttctgatcgtatatggggtggatacatcagtcacgtcaatatttgatttaatttcaccaaaccatttgtctaattcatcaatcattacattcgcaattgcttttttctcttcttcatatttttcgcggttgtttttttgcaaagtctcccagtattcagcagaagttttcgcatacacgataatactcgttttgccatcaggtgcgaaggaaggattttcgttatatattttcacaaatatgtttttaacgttgtcacagccatagctattaagaggctgttctaattccaggctcaaataatgaggatatttttcaaacgtttttgatacgcccaatccgacataaatttgcggtgcacttgttttaaggttgtcataacaaaatgtcagttcatcatctgtatattttccatccagcatttcaaaaatagttttatagccatccgctgctgaaatgacgatatctccataatgacactgcccgtttttcaactctattccgatcgctttatcattttctactaaaaccttagaaacaggtgatttatattgaatctcaccgcctaattcaacatatctagcttcaataatttttgcgaattgcagagaaccttctacaggatgtcctgaagatttgctattagcccagcctaaagtagccataaaataagatataggggtatctacattaaaccaaaacagacgatttacattctctcttacaaaactgcttttaaagcgctgggcgaattctttgatcgtcacttttccccattgccccattactttcatgtaagggccagcctttgctttgaaggcctcaaagtctgctaaatcgaacagttcgggcgctttatccaaatccagctctacatcagaaacaactcgaatgccatcagttaaaagcttaattgtttccgcatcttcaggtgcaactcttaaaaactcctgttctaatttatctacatctgcatacagcgtaaatgtatcaccatttctaaagttaacaaccgcaaattcttcatcattaatgaattccatattttgtattacgttcagttctttccaaaatttatggaacgtattgttaggtcctgaaccgaccagccagctgatacaaccgtcaaaaaagtacccttttctcttccagccggtacataaaccacccggcagcaaacccatttcaaagattttcgtgctgtatccgttcatttgcaagtaacagcccgcggccattcctgcaataccgcctccgattatgattgcagtcttgttttcttccgtattcttcattatttttccccttttccgtaactagttttctagaattttcaatccttcttgtatattgattttgccgttctccaggtcgtcaaatagattgttgagttcttgctcaagccgattttcagcagtatcttcttccgtttcttgctgtgaatctttattcagctgcttgtcaatatactctgatagctccactacagaggaatatgtaaatatatcggatatatccacgatgtcaggatattgttcattaatcagttttaacagttgggttgccataatagaatcgccgcccatggcgctaaagctttcatataaatctagctcttgcatatccaaaaccatagagtacatttgcgcaatacttttttcggtatcggagtaaagttctccctttcctttcagcactatatcttcagtatctgttcttcgacgtttttctgcttcgttttttgtcctgtttttatctattaatttgtttttgatttgctcagataattcaaaagacaattcatccttcgcaaaagcgaggagcttcatatttaatgtacctggaatgatattagtaagcttattcgatgctatttcttctaaaacggaaatagccctttctaccgtcaataatctgaaaatagagctctcatcagtaattccataatcgacagctatgccgacctcatcccaagccggccagttaattgacagcgtgttttttccctgtttgttttgcatataagcaaaggaatctaaataagcatttgcagctgtataatctccctgtccggcacctccgaaaatagaattaattgaggagaacaaaatcgtgaaatctaaatctacgtctctcgttaaatgattgataacccatgttccattaattttaggagcaagcacttctttaaaaatatcagcttcttttctaaagaggaaaccgtccccggcaactccggcacaatggaacacgccattgatcgtaccgtatttctgttttatttcttcaattaccggccccatgctgtttaagtcagaaacttcacagctgtagcaatcaactttagaacccattgactcgatagctctgatggacttcagttttctgcaaagctttaaatccgttccatcagcaatgatgtcgtcccatcggctttgatcaggcagtttagagcgattgagcaatacagcattgacgttatgttttccagccaggtgctttgcgatctccaaaccgattccgccggtgccgccggtaatcatatagacaccgttttctttaatttccaaaccgccgtgtttcttattctttattggttcaaccgtatccaaccgactgatataccgcttaccatccctaaaggcgacttgatagtgtttcccttttgttcttaactcctcactaataatttccggtgaagtatgttcatcaatatcaattgctttacatgaaacattttggaactcctgcgaaataacacgtcccagaccaaacaacgcggcgcccaatggattgattgtattttcttctccggacacttctgtcacaagatcagaaataagatgcaaattaatattgcttttcatcttattcttacttaacccccggactaagcggaacaggctgtatacgcctttattctgcatgtcttctaaatctgttaatgattccgttccttggcggctgatagaagacatatgtataatgctgctgatattttgatcgtttatgctatgcaataattgaacatagtcttcttctgatccgctaattagaaatttccgcccatttatcttctgaaactcatccccaaactccacttcaataacatcatcgtcacgaattttcaactgttccagtatagatttataaatttccatgttgtctttaaataacagtacaggacctgttacctctgttttttcttcttcaaaagcttcttgcgccatccattttaattgataaagtgattcagaactttcttcaaaaagggcattaatccgatttactttttttaatacataatcggtgatttctgcaaaaacatgtccttctgtatctattaactgaatatcacacagctttgtctctttgctgcttgcgttctttttgacaaacgcataaaaatgctgcggcattcttgagtaaatcttcacacttttatatgaaaaaggaaggaatgtactatcgtcatcatcttctccaataaacacgttcaccgcattatctagcaaagcgggatgtaaaaagacgtcttttaaatctgttgtaaattcatcagccaattttaattcggccaattgttcatcagggcccagtatgacttctttgaagttcagccacctcggtccgaaagtaaagactttgctgattaaaccatttttattttcataattgacttttatcttctctctgttactgtcattcctaacagagtctaaatcaaacattgatacagagtccgttaatggaaacgcttttccttctgcatgtgtaatccaggtttctccttcctgactggctattataaattgaatacattctttctttttcttaatgattgtgtgtacaatcttactctcaccctcatttaccgttaacggagtgaagaagataatatctcgtaattctaattgattgcttttatagtaagtggcacttgctcttcttcccatttcgatataagtcgttcccggaataacacaagcccccatgattttatggtcacttaaaacccaatccttattcacattaaatgtcgttgaataaatcgtctcattcattgaatcagccaaacactggtcaatcagcgggtgactgatatttttctgatgcggcgcttcacctcttctgtcctttacttctccccagcataatgttctttcaaattggtatgtcggaagactgacaatctttctgtgctcatccttgtacatttttgtccattctacttttgctcctctgatatacaggttgcaaatttccgtaaggtttagcagtaaatattcatccccttcagtaagaatgtcatgtatcaaattgtcagattgagcattcatttttcgatgttcagataaggaaatttctccttcatccataatctgttttctatcagaaccaactttatggaaagaaaaatatacgcctttttctgatatttcattcaggttttgtcctgcaagcctgccgatttttctctttaattcttcgtaactttttacaatcagagccaatcggtagccgtaatggccccgtcctgtgtttgccgtatagcaaatgtgttttacgtttttttgagttccttttttaaagaattcattatattccttgatgagtttcattaaagaattctctgttttagctgataaagtaaatatctcaaatgtttcatttgcaggaatgacctcttcaacctcatctccagcatcttcaatcactacatgtgaattggtccccacaaagccgaaagaactgattcccgctctcctcggtgagttatttttaggccattcatgggctttgtctgtaacaaatacaggtgacttcacaaagttaatcaatgaattcggttctttaaaattaatactcggagggatgacttgatgcttcatagacagaacgatcttgataagtgacgccaaacccgaaacggcaacagtatggccaatattagatttaacagatccgatcccgcaaaactgcaacttgtccgtatattttgaaaacgcattggaaatcccctttatttcaattggatctccaagctttgtgcctgtaccgtgcgcttcgatatattgaatggtttcgggatcaatttgagcattttcccatgcctgaaccagtacttcttcctgggcgatggcatttggagctgtcaatccgtttgaggccccgtcattattaactgcactccctttgataacagcataaatatgatctccgtcctgcttggctttacttaaaggttttaagatgactgccgctactccgtcactgaaaaatgtcccgtctgcgtctttatcaaatgagtgtactttatcacttactgattccatcattgattttttggacgttttgaagcgcggaaagaatcctaatgaaattccgctgacaatagacatatcgcattctttatttttcaaagcattacaggcaagatgcacaccaagcagccccgagctgcaagcagaatccaaaaccatagaacttccttttaaatttaataaataattaatccgccccgccatcaaacccggccagttgcccgtcatacttgtcgattctgattctgtaatgtagcggtacaacgtattattgacatggtcttttccaacaaagagcgatgtgttgcttccataaattttgtcccctgcataccctgcatcttcaatcgcagtccataccgtctccagcaatactctatgagacgggtcaatggcctttgcttctttaggagaaatattaaaaaattcaggatcgaacttgtctacatcttctaaatatccgccaggtttccagttatctgcttgttcttccgtcagatatcctgaaccgagaaaatcagtaaaccctttattgtttacgatcggcttaatgtaattgatcatatcttttggatattccgccttgcagtcttctccattcatcagattctgccagtattcatctgtattgtttgctttcggcagtctgcaggaaattccaatgatagcaatatcttcattgctgcttgcagcctttaattcttttagcattcgctttgcttctttctggcttagcttatgctgtttcacttgttcaaatatataagattgaacgctattcattacggatcactcccgctttctttctaagaaaatttttgataggaagggtaataagatctacaattttaccttaaaatggaattcagttcccataataatgtgataggcaggctgctttttcttcattcaattcgcagcctgccaatattccatttgcgaatatatttttacaggcccaattcagttattttcggtctggatgaaatatttgatttgcttcgctgacttccatctctccggatgccagcttattcaaaattgcatccaggtcatcttcattgtcttcttcaggaattcggtcagaagacttctgatcactgaagtgggattcaaggtaggttgacatctccttaatggagggatacgtaaaaatatcagaaacatcaatgagagaaggccattctttctctatttcttttaccagatatatcgcggatattgaatctccgcccaaatcataaaatttatcagttatactgatttgttctaagcctaaaacttttatccaagctttcattagtttattttcaatatcgctgaagcaaaatgtctgatcagttttcgactcaacagatttttttacaatcgcctgctccttaaaagtcaaaatatccggggataatcggaactgaatttgatcttgatttaattccagtacccgatgatcaatttccccgatgatcacattccggatgtccttttgcatgacttcatcgaaggcacgtatcgcttcagctgaggtaatcgtcttaaagccgttttcatctttatgttcgtttccggccttttgacgctcttcaatatattcggcaagcatacccacatcagaccagccgcaccaattaatcgtaactgttttttcatccggtcttcttcgctgtctgcgttctgcgaaggaatccaggtaggcattagccgcagtataatcagcctgccccatactccccgcaagtgctgtgatagaagaaaacattatgaagaaatccagatgctcatgctttgtcagctcgtttaatatccatgttccattaactttcggtctgagcacgttatcaaacacttttttttcctttctgaaaataaacccatctccagaaacaccagcactatgtatgacaccgtggattgtattgtatttactctttatttcctcgaatacatgaatcatttcactttcatttgcgacatcggccttatagtaatctaccttagaaccgctttcttttatttcttttagagcatcgattttctttttgtttcccttctccatgttgatctgctgctcggagcgtccaatgaggattaattggacattttcttttgatgataaatacttggccatttctaatcccagtccgcccataccgccggtaataacatatacaccgttctttctgatgcttattttcccttcccgaattacggataagtcttcagtctggagctcttgaacgtatttatgccgatctctgtaagcgacaagctctgactgttttgttgagttgatttcaaacatgatgttttccgccataagattttgatccaaatctatgcatctgacacttacacgcgaatattccttttcaattacttttccaaaaccgaaaaatgccgcgttatgcgggttaatgtctggttcttcaccgcttacttgatgtgcaaggtctgcaaacagcatcagttctatgttattttttgtattttctacaagtgattttgttaaataaaataaactgtctacccctgaggatatttttttctgaagctgatatatgtttttgtctttctcatcgctgatagacatcaaatggacaatctgagaaaccttttcactttgaagagtttttacaagacagtcataatcttcttgagaatcactgactgtataatgatggcttccgattttagagaaatagtcaccctgttccgcgacaatcacagttttcccttccagttctaagcttcgaatgatttcctcggataaactgcagccattattcttaaataataaaataggatgatgaatttctcgcatctcgtgtgattgatcgctttctcttatccaagatagcttatgatatatattgtttcttttagtcttttcagctgctttatgcaccctttttacgatgtaattgtttatttcaccgaatacttctccagtctcattcagcaggacgatgcgaaacgttcctgtttctccgttgcttcggctctttttcttgatataactgtaaaactttttagaagcggagccataaatcttaaattctttataaaaataagggagataggtttcgttatctatcgtgaatgtcccggcattaacggcacaatccatcatcgcaggatgaagcgaaaactgaacgaaatcactctcatattctttcggcaattccaattcacatagaagcctgtcgtcgtctctgtagattgcattggtgcatttccatctgcctccgacttgaacgatgctttccggtctattggtatcttctatatgataaaccgacttgtattcatcggtgtttatttctgtcaatggatgattattacgttgaatggcatagacagcattgaagcttttctttaaatcctcaatgtcatatgtttcccgtaccggttcttctttcgcaatgaccgcttccgcgtgctttatccatttatcgccggacttacttatcacactaaactctaaaacgctgtcctttttctttatgatcgtatgaacttctttaacttcatttgcttttacctttaactgatttgaaaacgtaacgtcttttaacagaatgccgacaggttcgccaaagtattttcttcccgcttctctagctgtttctatataaaccgttccagggataacgtaagaatcattcactttatgttcatttaaaaaccaataatcagtgacattcaaatgggatatatacacttccagattcagtgactgcactgcaagattgctcaataaagattgttttttctcatcggctgaagggccgtctgcagccggctcagcccataatctttttccgctgaatttgtatgtcggcaagctgaccttttgaaaattcatctcgctataaagatcttcaaagttgatattcgccccatcacaatacatttcacataaaatatgtgagtcagaggttgaaatattagagacgttttgtctgactctttgaatcacattttttattgtttgagtattctgcacactgtctgtatgcgtttttcctataaactttgtttgatttgttatcgattgaaagtatatatttttctcccgatacgttttccattcagagcatgataaaaactccagcttttccagcagttccgcgacagagcttattaccatagcgattctgtatttgtttggcaatctcccagtgtttgctgtataacatatatctcccagattcacatctgtttctctctttaaataatcaatatgatctgtaagcaagtgcgcgagtgatgttttagtcctagctgaaacagtaaaaatatgttcagataaaacggattgatcgactttttcaactgcgggtgcctcttctaaaatgacatgacagtttgtaccgctcagcccaaaactgctgatgccgcacctgtatactccgctgctctcccatgctgaaacggagtcattgacgtaaacaggcgattcatgaaaattgatatttcggttcggcactttaaaatgtaaacttggcggaatttttttatgctttaatgccattaccgctttaattaaacccgctattcccgccaaactatcaagatgcccgatgtttgttttgactgaagatacggcacagaactgttttcggtctgtatattttctgaaagcccgttgcaacgcatttatttcaatcggatcccctaatttggtccctgtcccatgagcttcaatatatgtaattgttttaggatctatttttgcatttttccacgcatctactattacttgttcttgagctgctgcgttaggagcggtaattcctactgagctgccgtcctggttaacagcgctccccttaatgactgcatagatctggtcatgatcacgaatcgcttgggccagcggcttcagcaatacggcagcgactccttcgccgctattcgtgccgtcagctgaatcatcgaaagtccttacagcaaaatcagatgaagaattcccgatatttaacctgctctcctctattgtcttggggaatacttttatgttcactccgccggctaatgccatatcgcaatccttatttcttattgcctgacaagccgtatggagggcgacaagcgatgaagagcatgcagtatcgattaccattgctggccctttaaaatccaagatatatgacagtctgcttgcgataactgatttaatgttacccgcggtagccagtccgagtaacgattgatctcctttttcaagcaatctgaagtattcatttgagccgtcactgctgagtccaatgtatactcccgtatttgtcccacataattttccgccgccgtaacccccgtcttccaatgcattccaggccgtttcaataaataatctttgtctgggatcaatcaactttgcttcatttggaaggatactgaaaaagtcacaatcaaatttatcaatctcatccatataggctatttttgtataggctgcatctttactgtacttggttccgctgttttttaatgactggtcagcatctttttttctgttcagcggaatgtccctgatgaactcttttcctcgtaaaagtaaatcccaatattcatttacgtgattggcttcgccgattctgcatgataaaccgacaatggcaatgtcatctccggaaatgtctttggccccttcctcgtttttttgtttctttacattcagagtttgatttgtaaaagcggccgcttttaaattacttaaacttataaagtctgttttcatttttttacctcgctgagaatcactagataggtaatcatacctgtcaaacttcaaagtcttcaaagtgtttttttgtgtttgtttcagaaaataattgattaaatctttttttctgttcatctattggggtttttttggttcgaaacactgacttcagcatttctactgccatatgcatttgttctcttgacggctgacgacctgatgtttcaagttcagcctgtatggcagctactttttcatatggttcgattacacctttggcgtattcctcattgttccagttgtaatttttagtagcaaccgcgatccctaaacttctcgagataatagaaaaaccggcttgcagtgaaacagattcgttcaaaagagtctcttttataattttcacgtcctcttctttgtcgtagctgtacgatttgatgtcagcgatattgtttcttacaagattccttaatacagatttcggcccaaattcaatcacagtatcagtatggtttgcttctaaatacttcatgattcccatccaatttaccggttttacgatttgagttcccagtatgtcagccatttgctgtttatccgaatatggaagagccgtcacattagataaaactttgtattttggagttctgagatcatacttttttaactcatggctgaatttttccgcagcaaaacccatgatcggagaatgaaaagcagcacttacatttaatttaaaaatgtctgctcctctggctttaagagtttcactaagctcttcaactgctgccgcttctccggataccacaacatctttatatccattgtagttagaaacagcaatcgtttttcctcttgaagagagagattcgcactcttctactgctattctttcatccaggttcctgataacagccattgctccggtcccttgtgcggcagcttctttcattaataatcctctggctctcaccagctttacagcgtcctggaaatccaaaacgtcactgcaaaccaaggcagaatattctcctaaactatggccggcgatgtattcaggttcttttccgatctcttccatgtagattctgaattgtgcaatacttgttgccaggatggccggctgagtattttctgtttgagatagctcagcggcacttccatctatacataatttcttcaggtcaaatcccaatgcatcactggcttcgtcatacgtttttttagcgataataaaattgtcacataaacgtttgcccattcctgcatattgagatccttgtcctgaaaataaaaaacctattttcgacatttaaatacctccaaagtctctataatgcctgatttgccttacattctgccgatcagcaaaatgtaaggcagaaccggccgctttatattgaattgtctgctttgtctgctgtaatcacttgaatcaaattcatgtagttataaaataaatccttcattttgtgctcatttagtttttgatggttatatataaaaacgatttctgcttcggatggcttttcatgaactgcaaaaaccagatcatataattctgagtactctttttttgattcattactaatataaaaaagaggaaaaacatcttgggccgaacttgatttcttatagtgagtattcaaatcgtattgatctgaatcctcttgattctcaatctgctccttcgccatacgaataatatcgtgaaaattctcgatatcagacagatcaaaagacagctgactcatccgatcatctccatgacccgaaaattggatatgaaccaagttttgctggctgacatcagctaataaaaatacataacccgctaataaaacatgagaaatatcatatttgtaggtattgcatattgtttttaaaccatcataataattcgcatttaccgcatattcgtgcatggctgtatgactttgtccagttgattccgagatgtattcaagcggtaaagtaataggaatgatttctttttccaaggacactgctatctccgcaaaggctatagctgattctatatattcggacaatctgtaaatagtcggatatgcaaacaagtcagcaatttgaatttgttttggatacagcttctgaagctcattataaactgcaacgattttgattgaattaccgcctgcttcaaagaagttatcatgtattccaggctcttctatttttaaaacatcggtccaaacacggctgatacttttttgtacatccgttaccgcttcctcaaaaggccggtcaaaacctgttctatctataacaggttcaggcagtgccaggacatttatttttccgtttgctgtcagcggaatttggtcaattttcataaagatctgcggaatcatatactcaggaagcacaggtgataataacttaataaattctgaaggatatacagtgctttctgccacataatacagaactaaatcttggactcctgcggaatttgtttttccggcagctacacattccttaactttttcgtgttggtttactatgctttcaatctcttccaattctatccgataccctctgatctttacctgattgtccattcttccgataacgtccagttcaccatttggcagccaccttgctaaatctcctgtcttatacatcttggttcctttaacaaacggattgtctacaaacttttgcgcagtcaaatcttcttttcctaaatatcctctggccattccggctccagcaatgcataattcgccagtactgccgagcggtacagtgtttccatcatgatctactatatatatctgtgtattcgcaatcggcttgcctatatttacactattttcattggttaagtctttcacagaagaccaaatcgtcgtctcagtcggaccgtacatattatagatcttcagatttttatatttttttagctcaaataacaattcccgttgaaatacctcgcccccaaccatgatggtcttcaatttctgaagactctccgtgctgttttctgcacttagcatcagctttaatctggatggcgtaagctgaatagtattgacatcagtctcaacaacgatcttgtttaacaagtacggatctctttgttccgcttcaccggctatgacaactttcagcccttgagttaaaggcagcagcaactctaatccgaatatgtcaaatgagcacgtggtgaccgaaagaaggacattgtcttgtgaaaagctgatcctgtctgttattcccttaataaagttatgaacggcacggtgctctacggcgacccctttcggttttccggttgatcccgacgtataaatgacatatgctaaatcttcggccctgttaataacatcaatgttcgcctccaactgatgtaataaatcctctgaatctatgttaaatatggttccgctgtacgttaattcatttggaagtccttcctcagttaacagcaggccgcttttactgtctttcagcatataattgatcctgtctgccggataatcaggatcaagcggtaagtagcatccccctgcctttagtattcctaatattcctataatcaatcggaaagaccttcttaccaaaataggaaccacaacattctctttgatgccgttttccctgagggctcttgccaattgatttgccttattattcagctccttataggtcaggaagtctccgttccattccagagcgattgcatcaggtgtccttacagcttgctcttcgaagagctcttgtaacgtcttttctttcttatatgataattccgtgcagttgaattctttcaccagcttttgtttctctgtctcatttaccatatcgatctgagaaactattacttcatgatcagccgctgcctgctgtaaaacgctaaccaggttatccaagattgaacttaccgtttctttactgtaaacactggcgttatatgtgattttcatatgcaattcgtcaccgggagcaattaaaagctctaaatcatagttggtttgttcaaacccatgttcagcagttatttttacactcgaacgggctgaatcttggaaaagatcctcattcaacgggtaattttcatacacgactacgtgattgattaatttattcttcatacttgtcaaagactgtatgtctgccagagaacaataactgtattcgttcgcttcaataaagtctttatttatttgtttagccaatgaaataaatgatgtatcacgttctcttttcactctgattggcactgcatttataaataagccgaccatattttcaattccgtttatctcactcggtctgcctgaaacaatggaaccaaataccacatcatttgtattgttatatttctgcagcaatatcccccatgctgtttgaacgatagaatttaatgtaatgctgtttgactcagcgatttttttcagcttagcggcggtttcaccgttaagcgctcccagtttttgatcatgctgatactcgtcagatttcaattccagttccggaaatgagatttcttgttcatatgcagaaaggtattccttccaatattcaaatgcacggtccttgtcctgctgatcaagccattcaagataacgactgtacggtacaggtgtttcttgaaggagttttttcccttcagccacgtcaccgtatagatccataagctcttttaacagaataccgacactccagccatccaaaataatgtggtggaaactgtatatgactttaaatttatttcttcccagcttgatcaccgatactctgatcagacaatctttgttcagatcaaacggagtattcctgtctctcaccttgaattgccctacaaaggcatccttcttctgctcctcccattggctgatatcatgatattgaatgtttagttttctttcttttaaaatggcttgtttaaatacacggaaaccgttatagaaaaatgacgttcttaatatttcatatttagcaatcagtctgtttaatgcgtcactgagaacttctgtattcagatttccttcaactgttatttcactttgttcgaaataagcgctagattgatggtcaatcacagcgttatacagcatgccttcctgcatcggtgaaagagaatgaattttttctacttcagcaccgcttgcaagaatttgatttaactcctctatttgaagatcgggatccccataatcccatggggttttctcagatattttcttattcacacaatgttctatgatctgatttattttcaattgataggctttcgtaaattgctcaatcgtctctcgtttatattggtttgcactgtaattgaacgaaaacatcagcctgccatccatgatatatccatttatttctatactatgtgtctttttatttcttccagatatgctcgttccggcggacaaaggtgatatttgaaataggttgctgcgatcttcttggccaaattcacccaagtagttaaaactgatatcaggttttaattgaaggtgaaccgagtccgacaaatatctgagtattccgtaaccaatcccgttttgggggatatgtctaagcatttcctttgtatacttaatggagcttgataaactattactttctgtcatatcgagaacaattgggtatattgtcgtaaaccagcctattgtgcgatggaccggggtttttataacactttcacggccgtgcccttcaagattcacaaggatcttctcgttgccggtccattctttggctgcaagtcccagtgagcaaagcaatatatcattaatttgtgtatgatatgctgcatttgtatttcttaaaagtgtttttgtttgatcctctgttaattcaattttaatttctttactatcttcataagagcagctttcggcaatgaaatcctttggaagaggttcaataatagccgtttctatggtctcccagtacccagcttccttttgaagagccttgctgtttgcatattctttcaattgacgcgcccattctttgaacgatgctgttttagtttccagctccaccttgttcccattaactgtttgaagataagctgttccaaaatcttccaataggattctccaagatactccgtcaatgatcatatgatgaatggttaatagaagatgatctccgtttttggttttaaataccgccagttttattaaaatccccttttccaagctcaattcgttctgcatacggtcagccagtgattcaattgccatggctggatcttctgtttgtgtcatatcaaatacgtctaaagtaaatgtttcttttgcctgtttaatgcccctattccattgcttaatttcaccgttttcctttttaaactgcatcctgagggcatcatgatgcctcaccaattccaaaaaggccgtttcgattgctttttcttctatgccggactttttgtaaagcataaaggcttggttatagtggttttcttgttcaaatctctgttctataaaccatttttgaatcggtgtcagatcaacgtctccttctacaatcgactgatctgcttgtatatcagctgattttacgtgagcactcaagtcttttatgtgcggatatttcattaaatctctgacttcaagttttaagccgtatttttggagttcggaaactactaaaatggatttaattgagtctccgccgatctcgtaatagttatagttaatcccgattgatttcatccccagaactttctcccatacgcatgcgagaatttgttcctttttattccgcggtgcttcatatgcagactccaatacatccgcaatatctataatcggcaatgatttcgtatctatttttccgtttgaacttaacggcattttttcaatctggaagatataacttggcaccataaataacggtaattctttagacagattttcttttaaagcataaacatctatttttttgtcggaagtaacataaccgcagagatatttatccccatgttggtcatctctcgctacaacaacagcctctcttatgtgactcattttcagaagccggttctctatttctcccgtttcaatacgataccctctgattttgacttgatcatcaattcttcctaaataatcaattgtcccgtccggcatccattttgccatatcccctgttctgtataacttagccccgggttcaaaggggttatctacaaatttttctgacgtcaagcccgctttatttttatatccgtccgcaagcccttctccgctgacacaaagttccccggctgcccctaaaggaagtaattccaattgttttcctaatatataaagcttagtattatccgcaggtttgcctattgatactgcattgccattgtctctttcaatatgatattgatgaatcatacacccgactgtagcctctgtcgggccgtattcattgtagattttgacatgaccgttaaatgcaccgtgtatcttttttgcaagcccggttttcagctcttccccgccgacgattattttttttatctttgacgtacttaaatctatattctccagcaatctcaaatgcgtcggcgttagcttaataatatccgctttattttcttctataattcttctgatcagaagagccttgtccggtccctcataaataataattttatttcctgaaataagcggtgtataaattgaagtaaccgttaagtcaaaagaaatagaagaatacagaggaaaatcaatatcttcatcatttacatatatcttatttgcccaatgaatataatttaccacgcctttatgttttaccatgacgcccttcggcagccctgtagtccctgaagtataaatcatgtaggcaaggtcttccgggcaactgacattcggcagattacttctgttatgcatatatagagcaggatcgcttaatgataaaatttctttattgaatgtaataccacctgacaatccgttttgaattaggagaatgtttgcatcactgtctttcagcatgtaatttactctttcatcaggatattcaggatctatcggcaaatacgctccccctgctttcagcaccccgataattccgatgatcatctcaaaagatctctctgtcatgattccgacaatgctgttttctctaattcctttttgtctcaaaagattagccaggctgtttgatttctcgtttagttctttataggttaatagcgtatcttcttggacagccgcaatacgttcaggtgttttttctgcctgctcttcaaataattgatgaatcgttttatttcgcggaaattcagctgccgtgtcattgaatatatggagcaatgtgtgcttctcctgttcaggaatcatatccaatttcattaaaggctgatctaggccggcagctgcactttgtaaaagcttcgtaaaatgggcacccattctctcggctgtttctttttcaaataattgactggagtattccaagtggaacttgattcctttatcaatttccgtcgcggttagcgttagatcgaattttgaaatattgatctcggtttgaatatgctcttccggatttggatccaagtgattttcaataccgtaatctgcattttcaagtacaaacatgacatcaaacagcgggttccggctcgaatctctttttaccccgagtttttgaacaatattttcaaattggtaatctgtattctcaaaatcttttaacgtatgatgtttgacctcttctaaaaacgctctgaatgttttatgttcctcaggaaaatttcttatggcgacggtattgacgaacatccccaccgtattctccagttcggtgtctgaccttccggactctgctgttccgatgatcacatcctgctggccgctgtattttgaaagcatgacattatataccgccagcagcaccatgtacaaagttgttcctgtttctttcgccaccgactttaagcttgatgttaacctttcatcggccgtaaagctgattcggcttccttcaaagcttttgactctcggccgctcataatcagtctgcagattgagaatcggcagatctccgcttaaccgcttaagccaatactcctcttgttcctttaacgcctcttttgttcctgagcttacttgccattctgaataatctttatattgcagcggcggctgttttagtttatgacccgcatacagcgcattgaattctttgcggattattccaaccgatacac

SEQ ID NO: 7 - DNA, 62216 bp, Bacillus subtilis
cccttgtgcctttacactctgcgaatgatttccaaccattctgagggaacctttgggcgcctcctaaaaggtaacggaggcgcccaaaggttccctcagaatggttggaaatcattcgcagagtgtaaaggcacaagggagcttgactgcgagacctacaagtcgagcagggacgaaagtcgggcttagtgatccggtggttccgcatggaagggccatcgctcaacggataaaagctaccccggggataacaggcttatctcccccaagagtccacatcgacggggaggtttggcacctcgatgtcggctcatcgcatcctggggctgtagtcggtcccaagggttgggctgttcgcccattaaagcggtacgcgagctgggttcagaacgtcgtgagacagttcggtccctatccgtcgcgggcgcaggaaatttgagaggagctgtccttagtacgagaggaccgggatggacgcaccgctggtgtaccagttgttctgccaagggcatcgctgggtagctatgtgcggacgggataagtgctgaaagcatctaagcatgaagcccccctcaagatgagatttcccattccgcaaggaagtaagatccctgaaagatgatcaggttgataggtctgaggtggaagtgtggcgacacatggagctgacagatactaatcgatcgaggacttaaccaatttgaatgtatgcttactgttatctagttttgagagaacactctcaatggtttggtggcgatagcgaagaggtcacacccgttcccatgccgaacacggaagttaagctcttcagcgccgatggtagtcgggggtttccccctgtgagagtaggacgccgccaagctatattatagtaaaggcagctcatcatgagctgccttttttgtgtttttctgcatacgttatataatatgagaaacgtaacgatatgcctttttgcaaaagcaggttttatgcttgtacaaagtggaaataatagagatagagcgatacagttgaaaaattttgcgaaacaccttatagtaagattaaagtcaaatatagtcaaagtcaataaaggagggggttgagtgggacataatatttctgacatcattgaacagtacttgaaacaagtattagatcaaaatggcaaagaaattttagagatcaaacgcagtgaaatcgctgataaatttcaatgtgttccttcccaaataaattatgtcatcaacaccagatttacaagtgaaagaggatatattgttgaaagtaaacggggaggcggcggttatattcgtattatcaaaattaaaatgaataacgaagtcgtcctcatcaataatattatttcgcagattcatacccacttgtcccaggcagcctctgatgacattattctcagactgttagaggacggagttatttcggaaagagaagctaaaatgatggtgagtgtaatggatcgttcagttctatatattgatttgcccgaacgggatgaactaagagccagaatgatgaaagcaatgctcacatctttaaaactaaagtaagcgggtgaaaagattgatttgtcaagaatgcaatgagagaccggccacttttcactttacgaaagttgttaatggagaaaaacaagaagttcatatttgtgaacaatgtgcaaaagaaaatagcgattcatacagtataagtggaaaccaagggttctcgatccataatttattatcagggctgctgaatatggagtcttcacttcaaaacaccggttctcaaatgttcggctactcagagcaaggcacagcttgtaagaaatgcggtatgacgtttcagcagctgagaaaaacagggcgtttcggctgtgcggaatgttacgatacgttctacagccaaattacgccgatcttgcgaaaagttcacagcgggaatacggtgcatgccgggaaaattccaaaacgaataggcggaaacctgcatgtaagacggcaaatggaaatgttaaaaaaagaacttgaatctttaatacaccacgaagagtttgaaagagcagcggaggtcagggatcagatccgatcgttagagcagaaattaaaaagtaaagacagtgagggggaacaagggtaatgtcgctcaagcattttattcaggacgcactaagcaattggatgaagcaaaagggacctgaaagtgacattgtactcagcagccgtatacggttggcccgaaactttgaaaatataaagtttcccgcccggtatacgaatgaagaagcctcatccatcattcagcaattcgaagatcatttttcaggaaaagaactgcctgatatcggtcaatttcatttaatcagaatgagtgaagctcagcctttggaaaaacgggtgctgatggagaaacatctgatcagcccgaatttaacggaatccccttttggcggctgtctgctttctgaaaatgaagaagtcagcattatgttaaatgaagaagatcatatcagaattcaatgcctcttccccggcttccagcttctcaacgccataaaagcggcaaaccaggttgatgactggattgaggagaaagtggattacgcctttggagagaagagagggtacttaacaagctgtcctacaaatgtagggacgggactaagggcttcagtcatgatgcatttgccgggtcttgtattaactaggcaaatgaatcgaattataccggcaattaatcaattaggtttagttgttagaggaatttacggtgaaggcagcgaagcattaggaaatatctttcaaatttcaaatcaaatcacactcggaaaatcagaacaggacattgtagatgatttaaacagtgtggctgcccagctgattgagcaggaacgttcagcccgagaagcgctttaccaaacctcgaaaattgaattggaggaccgggtattcagatcttacggcgttttatccaactgccgtatgattgaatcaaaggaaacggcgaaatgcctttctgacgttcggctggggatagacctggggatcattaaagggctatcaagcaatatacttaatgaactgatgattttgacacagccgggttttctccagcaatattcgggcggtgcattacggccgaacgaaagagacgcgagaagagcggctcttatcagggaaaggctgcatttagaaatgagtgcaaatagacaggaggatgattcgatatgatgtttggaaggtttacagagcgagctcaaaaggtattggcactggcacaggaagaagcactgcgcttaggccatacaaatatcggaactgaacatatactattagggttagtccgtgaaggtgaagggatagcatttaaagctttagaagcgcttggccttaattcagataaaatgcagaaagaagtggaaagtttgatcggtcgagggcaggagagcaccacctctgttcctcattacacacctcgagccaaaaaggtaatagagttatcaatggatgaagctagaaagctaggacattcttatgtgggaacagaacacatacttctcggactgattcgtgaaggagaaggcgtagcggcgagagttctgaataatctcggtgtcagcttgaataaggcgagacagcaagtgctgcagcttctgggaagcaatgagacggggtcttctgcatccggtacgaacagtaatgcgaacacgccgacgcttgacagcttggcgcgtgatttaactgcgattgcgaaggaagacagtcttgatccggttatcggccgaagcaaagaaattcagcgtgttattgaggtattaagccgcagaacgaagaataaccccgttcttatcggagaaccgggtgtaggtaaaactgcgattgctgaaggccttgcacagcagatcatcaataatgaagtgccggaaattttacgtgataaacgcgtaatgacattagacatgggtacggttgtagccggtacgaaataccgcggagaatttgaagaccgcttgaaaaaagtaatggatgaaatacgtcaggccggcaatattattttattcattgacgaactgcatacactgatcggagcggggggagcagaaggtgcgattgacgcgtcgaatatcttaaaaccttcactggcccgcggagagcttcaatgcatcggtgcgacaacacttgatgaataccgtaaatatatcgaaaaagacgccgctctcgagcgccgtttccagccgattcaggtggatcagccgtcagccgatgaaagcattcaaattttaaaaggactccgtgaccgctatgaagcgcatcaccgcgtatccattaccgatgaagcgattgaagcggcggtaaaattgtccgaccgttatatttctgaccgcttccttccggataaagcgatcgatttaattgatgaagccggttcaaaagtgcgtctccgttctttcacaacgcctccgaacttaaaagagcttgagcagaaactcgatgaagttcgcaaggaaaaagacgctgctgttcagagccaggagtttgaaaaagcggcttcccttcgtgatacggagcagcgcctgagagaacaggtggaagacacgaaaaaaacgtggaaagaaaaacaaggccaggagaactccgaagtttctgtagaggatatcgcaatggttgtatccagctggaccggggtgcctgtatctaaaattgcccaaacggaaacagataagcttctcaatatggaaagcattctgcactcccgcgtcatcggccaggatgaagccgttgtagccgttgcaaaggctgtcagacgtgcaagagccggtctgaaggacccgaaacgcccgattggttcattcatcttcctaggccctacaggcgttgggaagacagagctggcaagagcgctggcggaatccattttcggtgatgaggaagcgatgatcagagtggatatgtccgaatacatggagaaacactcaacttcacgtcttgtcggttctcctccgggatatgtcggctatgatgaaggcggccagctgacagaaaaagtgagaagaaaaccttactctgtcgtactgcttgatgaaattgaaaaagcgcaccctgatgtgtttaacatactcctgcaagtgcttgaagacggacgattgactgattcaaaaggacgcactgtggatttccgcaacacgatcctgattatgacgtcaaacgtcggagcgagcgagctgaaacgcaacaaatatgtgggcttcaatgtgcaggatgaatcacaaaaccataaagacatgaaagacaaagtcatgggagagctgaagcgtgccttcagacctgagtttatcaaccggattgacgaaattatcgtcttccactcccttgagaaaaaacatcttacagacatcgtgtcgcttatgtctgatcagttaacaaaacgtctgaaagaacaagatctctctatcgagctgacggatgctgcaaaagcaaaagtggcagaagagggcgtcgatttggaatacggcgcacgtccgttaagaagagcgattcaaaagcatgtggaggaccggttatcagaagaactcctcagaggcaatattgataaaggccagcacattgttcttgatgttgaggacggcgaatttgtcgtaaaaacaactgctaaaacgaactaatatagtgacaaacatgaggcatacgtaagcgagtgtatgcctcactttgttatatagagaaatattcgataaggaagaggtcttacaacatatatggctaaatcaaaaacaaaattcatctgccactcatgcggttatgaatccgcaaaatggatgggaaagtgcccgggctgcggggcttggaatacaatggtggaagaaaccataaaaaaagcgccggcgaatcggcgggcggctttctcccactccgttcaaaccgtccagaaaccatcacccattacatcaattgaaacatcagaagaaccccgcgttcaaacaaagctcgaagaattcaacagagtgcttggcggcggcgttgtgaaaggctcgttagtattaatcggcggcgatcccgggatcggaaaatcaacgctccttctccaagtatccgcacaattagctgatacggccggcagcgtgctttacatttcaggggaagaatccgtgaagcaaacgaagctgcgcgccgacagacttggaatcaacagccaaatgttacatgttttatctgaaaccgatatggagtatatttcgtctgctatacaagagatgaaacccgcatttgttgtcgtagactccattcagaccgtttatcaaagtgatatcacctcagctcccggcagtgtatcacaagtaagagagtgtacggccgaattgatgaaaatcgcgaaaacaaacggcatacctatttttatcgtcgggcacgtcacaaaagaaggatcgatcgcagggccgagattgcttgagcacatggtcgataccgttctatactttgaaggagagcggcaccatacattccgtattttgcgggccgtaaaaaaccgtttcggctccacaaatgaaatgggcatctttgaaatgcgggaagaggggcttacggaagtgctgaacccttctgaaattttcttggaagagcgttctgccggggcatcgggttcgagtatcgttgcgtcaatggaaggaacgagaccgatcctggttgaaattcaggcgctcatatcaccgaccagttttggaaacccgcgccgtatggctacaggcattgaccacaacagggtgtcgttaattatggctgtgcttgagaagcgggtgggtcttttgcttcaaaatcaagatgcgtatttaaaggtcgccggcggggtcaaactggatgaaccggcgattgatttggcagtagccgtcagcattgcttctagcttcagagatacaccgccgaatcccgcagattgctttatcggtgaagtgggtctgacaggagaagtccgcagggtgtcaagaatcgaacagcgcgtaaaggaagcggcgaaactcggcttcaagcgcatgatcatacctgaggcgaatgcagacgggtggacaataccaaaagggattgaggttgtcggagtagcaaatgttgcagaagcgcttcgtacttcattaggaggatcataatagatggaaaaagagaaaaaaggggcgaaacaagagcttgacctgtctgcaattctgcagttcgttgcaccgggcaccccgctcagagccgggatagagaatgtacttcgggcaaatacaggcggcctgattgttgtcggatacaatgataaggtaaagcaagtcgtggatggcggttttcatattaatacatcatttgcgcccgctcacttatacgagctggccaaaatggacggtgccattattctaagtgattccggccagaaaattctttatgcgaatacgcagcttatgccggaagcgaccatttcttcttcagaaacgggaatgaggcaccgtacggcggaacgggtggcgaagcagaccggctgtctcgtcatcgccatttctgagcgcagaaatgtcattacgttatatcaggacagcatgaagtacacactaaaggacataggttttattttaacaaaggcaaatcaggccattcaaacgctcgagaagtataaaaccattttagacaaaacgattacggctttaaacgcattagagtttgaggagcttgtgacattcagtgacgtgctgtccgtcatgcatcgatatgaaatggtgctccgaataaaaaatgaaatcaatatgtatattaaagaactcggaacggaaggccacttaatccgtctgcaggtgattgaactgattacggacatggaagaagaggcggcacttttcatcaaagactatgtcaaagaaaaaatcaaagatccgttcgtgctgttaaaagagcttcaggatatgtccagctatgatctgcttgatgactccattctgtttaagctgcttggatatccggcttctaccaatcttgatgattatgtgctcccgagaggatacaggctgctgaacaaaattccgcgtctgccgatgccgattgttgaaaatgtggttgaggcgttcggatttttgccaagcataacggaagccactgtagaagagcttgatgatgtcgaaggtatcggcgaagtgcgcgccaaaaaaatcaaaaaaggcttaaaacgccttcaggaaaaacactatatagatagacagctttaagaatcgcttaaacctgtcggaatccgggtatattattgttagtttttgtttattctgaatttgtaggctctgacagtctgctgaaaaaatgctacttaaaaggaggtggaggtatgttaaaacgaatagttcaggcgttcttcattattgtgggcggcgttgtcggtatctttttaatacctgaattgtttgtgctgtcaaatatacaggacatacctttaataacaaacgcatatacgtctgctgcaattggtgctattatcttttttctcatcagtatatggacgacagaatatgtgattaattgggtaaaatggattgaagattctttgctgagagctccggtgccggatctgttattcgggagtctcggattggtttttggacttatcatcgcatatctcattgtaaacgtgattccgctggacaatattccgtaccgtatattcagcaccatcattccggtctttctggctttctttctcggttacctgggcttccaagtcggatttaagaaaaaggatgaactgatcagtcttttctccatttctgcaagaatgcagaagaaaaagggaagtgctgatgaggagcaggaggaacaggataaaaggctgaaaatcttggatacaagtgttattattgatgggagaattgcagatatttgtcagacgggctttttagaaggcgtcattgtcattcctcaatttgtgctggaggaattacagcatatcgctgattcttcagatgttttaaaacgtaacagaggacgccgcggactggatatcttgaatcgcattcaaaaggaactggatattacggttgaaatttatgaaggcgacttcgaggacattcaggaggttgacagcaagcttgtcaaacttgcgaagctgacatccggtgtcgttgtgacgaatgattttaatttaaataaagtatgtgagcttcagaaggttgcggtactgaatattaatgaccttgcaaacgcggtgaagccggttgtgcttccgggcgaagagatgaatgtgcaggtgattaaggacgggaaagagcataatcaaggtgtggcttacttggatgacgggacgatgattgttgtggaagaaggccgcaattatatagggaaacatattgatgtgctcgtaaccagcgtactgcagacagcggcgggacgaatgatttttgccaagcccaagctgcttgagaaagctctttaagagggagttcatatggagtatgttgtcgttattccggctgccggacaaggaaaacggatgaaggccgggaaaaataagctgttcatcagcttaaaaggtgcgcctgttattatacacacactgcgggtttttgaaagccacgcaccctgtcagaaaataatcctggtgataaacgagagtgaacgggaagattttcgccagctgctggctcaatttccgattcagacggaaattgagcttgttaccgggggggcggagcgtcagcacagtgtatacgaaggactgaaagtgattgataaggaatcggtcgtacttgttcatgacggagcgcgcccgtttgtcacacatcagcatatcgataagctcgttgaaacagcagaggaggcgggagcggctgtcctggctgttcctgtgaaagacacgataaaacgggcggaaggctcccgggttgcggagacctttgatcgttcaagcttgtgggccgttcaaacgccgcaggcttttcgtctttctttattgaagacggcgcatatggaagcggaaaacaaaggctttttaggtacggatgacgccagcctcgtcgagcgtcttgatggatatcaggtgagtatcgttgaaggcagctataccaatattaagctgacaacgccggatgacctgatatttgcggaagcaatcatgaaagcggaaagtgggaatcataatgtttagaatcggacaaggatttgatgtgcatcaattaacggaaggccgtcctctcatcatcggcggaattgaaattccttatgaaaaggggctgctcggacattcagatgctgatgtattgctgcatacagtcgcagacgcgtgtctcggagcggcaggtgaaggagatatcggcaagcatttcccggatactgatccggaattcaaggatgcggattcttttaagctgcttcagcatgtctggaacattgtaaaagaaaaagggtacgtactcggaaatatagactgcacgattattgcgcaaaagccgaaaatggcgccgcacattgatgctatgagaaaacggatagcggaaggccttgaggcggacgtctctcaagtaaacgtaaaagcgacgacgacagaaaagctcgggtttaccggaagagccgaaggaattgccgctcaggcgaccgttctgatccaaaaagcctgatcattgttttgatgcccggtctatttggtggtagaatagatacatatattcggctagaggctacagacgagatgaaaggaagtatttgaacatgggaaatgaagtacgcgttcgttatgcaccgagtccgaccggacatttgcatatcggtaacgccagaacggcgctttttaactatttatttgcccgcagccaaggcggaaagtttattatccggattgaggatacggacaaaaagcgaaatattgaaggcggagagcaaagccagctcaactatttgaaatggctcggcatggactgggatgaaagtgtggatatcggcggagaatacggcccgtaccgccagtctgagcgtaacgacatttacaaaaagtactatgaagagcttcttgaaaaagggcttgcttataaatgtttctgtacggaagaagaacttgagaaagaacgtgaagagcaaatcgcccgcggggaaatgccgcgctattccggcaaacacagaaacctgactcaggaagagcaggagcagtttttagccgaaggcagacagccgagcatccgtttccgcgtgccggaagggaaaatcatcgtatttaacgatatcgtaaaaggcgagatttcttttgaatcagacggcatcggcgactttgtcatcgtcaaaaaagacggaacaccgacgtataactttgccgtcgcgattgacgattacttaatgaaaatgacgcacgtgctccgcggtgaggatcacatttcaaatacaccgaaacagatcatgattttccaggcattcggctgggatgttcctgtcttcggacatatgacgcttatcgtaaacgaaagccgcaaaaaattaagtaaacgtgatgaatcaattatccagtttattgagcagtatgatgagctgggttacctgcctgaagcgctgtttaactttatcggacttctcggctggtctcccgtcggtgaagaagagcttttcacaagagaacaattcattgaaatttttgatgtaaatcgtttgtctaagtcaccggctctgtttgatatgcataaactgaaatgggtcaacaaccaatacgtcaaagcgctggatcttgatcaagtggttgagctgaccctgccgcacctgcaaaaagcaggaaaagtcggcactgagctttctgccgaggagcaggaatgggttcgtaaattaatatctctttaccatgagcaattgagctacggcgctgaaattgtcgagctgactgatttgttctttaaagatgagatcgagtataatcaagaggcaaaagccgttctggaagaggaacaggtgcctgaagtgctcagcgtatttgctgcgaagcttgaagagcttgaagaatttacgcctgagctgatcaaagcctcaatcaaagctgttcagaaagaaacaggccataaaggcaaaaagctgttcatgccgattcgtgtagcggttaccggtcagacacacggtcctgagcttccgcaggccattgagctgatcggcagagaaacagccgtcagacgcctgaaaagcatttaaatatacgattgttgacagggaagagtataaaacaatgaccattacagaaagaatcttcatcggctgagagagattcatgcgtcatgttttagaagtgcgcccttaagacctttgaagaacatttctgcggaaatcagtatttaaaggcggccgccgccgttaccggcttttaagttgggaaaacagtgacttgtttttcaaacagagtggaaccgcgcggtaaaagcgtctctgtcatgtttacatgcagaggcgctttttttataggcggaaaaacagactggagcggggagagaatggggggaagcatgtgttttttaaaatgcttaaagaagacatagatacagtgttcgatcaagatccggcagcaagaagctatttcgaagttgttttaacttattctggtttacatgctatatgggcgcatcggattgcacatgctttatataaacggaggtttttcttcctggcgcgcctgatatcacagattgcccgtttctttaccggaattgaaatccatcccggcgcgaccatcgggagaaggtttttcattgaccacggtatgggggtcgtcataggggaaacatgtgaaatcggcaataacgtgacggtattccaaggtgtcactctcgggggaacgggaaaagaaaaggggaagcggcatccgaccataaaagatgatgctttaattgcaaccggagcgaaggtgctcggctctattacggtcgggcagggttctaaagtaggggccggctccgttgtgcttcgtgatgttcccgacttttcgaccgttgtcggcataccggggaaagtcgtcattcagaacggaagaaaaatcaaacgcgatctcaatcaccaagacttgcccgatccggttgctgaccggttaagagcattggagcagcagatttttgagctgcaggctgaactggaagataaaaaagaaaggatcaaccaaaaatgaccattacactttataatacattgacacggaaaaaggaaacattcgttcctcttgaggaaggaaaagtaaaaatgtacgtgtgcggaccgactgtatacaactatattcatatcggaaacgcccgtccggcgattgtgtatgataccgtacgcaactatttggagtataaaggatacgatgtccaatacgtatcgaatttcaccgatgttgacgacaaactgattaaggcggccaacgagctcggcgaggacgtcccgaccatttctgaacggttcattaaagcgtattttgaagatgtgggcgccctcggatgccggaaagcggatcttcacccccgggtcatggaaaatatggacgccattattgaatttgtcagcgagctgattaaaaaaggctacgcttatgaatcagaaggcgacgtctatttcaaaacaagggccttcgaaggctacggcaagctatctcagcaatcaattgatgaactcagatcaggcgcgcgtatccgtgtcggcgagaagaaagaggatgcgctggactttgctctttggaaagctgctaaggacggagaaatttcatgggatagcccttggggaaaaggccgcccgggctggcatattgaatgctccgcaatggtgaaaaagtatttgggtgacgagatcgatattcatgccggcggtcaggacctgacattcccgcaccatgaaaacgaaatcgcccaatctgaagcattaacaggcaagacattcgcaaaatactggcttcacaacggatatatcaatatcgataatgagaagatgtcaaaatctctcggcaactttgttttggtgcacgatatcattaagcaatatgacccgcagcttttgagatttttcatgctgtccgttcattaccgccacccgatcaactattcggaagagctgcttgagaaaacaaaaaacgcgtttaaccgcctgaagacggcctacagtaatttaaaccatcgtttgattagcagcacgaatctgactgacaatgatgaggaatggctcgctaaaatcgaagagcaccgcactgcgtttgaagaagcaatggatgatgattttaatacggcgaatgcgatttccgtttggtttgatctggcgaaggtcgccaattactacatgcaggaagacaatacggcggatcacgtcattaaagcctttatcagcatgtttgacagaatcggatctgttctcggacttacgctcggcgaagaagagcttgtcgacgaagagattgaagagttgattgagaagagaaatgaagcccgccgcaatcgcgattttgctttgtcagaccagattcgcgatcagctgaaaagcatgaatatcattcttgaagatacggcccagggaactcgctggaagcggggagagtaagcggatgcttcaatttgaacaaatcaaagattcaaagcagttaaacggtcttgcgcttgcttatatgggtgatgccatttttgaaatatacgtccggcatcacctgcttaagcagggctttacgaaaccgaatgaccttcataagaaggcgagccggattgtatcggcaaaatcacaggcagacatattgttccgccttcaggacgaatcctttttcacggaggaagaggaagccgtgctgagaagaggcagaaacgcgaaatcagggacgacgcctaaaaacacagatgtacagacgtaccgccatagtacagcttttgaggctttactcggatacctttttcttgagaaaagagaagaaagactgaatcagctgattgctgaggctatacaagtcgggacgtcagggaggaaaacaaatgagtcagcaacatgattacgtcataggaaaaaacgcggtgattgagacgttgaagtcagatcgcaagctgtataagttatggatggcggaaaacacagtaaaaggacaggcgcagcaagttatggagcttgctaaaaagcgcggcgtcaccattcaatttgtaccgaggaaaaaactcgatcagatggtggaggggcagcatcagggtgttgtcgcccaggtggcggcatatgaatatgcacaattagacgaattatataaaagagcggaagagagaaacgaacagcctttctttctcatattggacgagctggaagaccctcataatctcggttccatcatgagaacggctgacgctgtcggtgcacatggcatcgtgattccgaaacgcagagcggtcggactgacttcgacggtcgcaaaagcttcgaccggtgcgattgaacacattcccgtcgtgaaggtgaccaaccttgcccggacacttgatgaaatgaaggagcggggggtttgggtcgtcggaacggatgcatccgcccgggaagactaccgctctatggacggcaagatgcctttggcgctcgttatcggaagcgaaggcagaggaatgggccggcttgtgaaagagaaatgtgattttctcattaagcttccgatggccggaaaagtcacttctctgaatgcgtcggtagcggccggccttctcatgtatgaagtctaccggaagcgcaatcctttaggggaatgaagacagatggacatcctgttagtagacggatacaacatgattggagcttggccgcagctaaaggatttaaaagcgaacagttttgaagaagcgagagatgtactgatccagaagatggcggaatatcagtcctacacgggaatcagagtcattgtggtgtttgatgcacacctggtaaaaggcatagagaaaaaacaaacgaatcacagagtcgaagtgattttcacacgggagaatgaaacggcggatgaacggatcgagaagcttgcccaggcgctgaataatattgcgacacagattcatgtcgcaacctccgattatacggagcagtgggcgattttcggacaaggggctctccgcaaatccgcccgggagctcctgagggaagtggatacgatagaacgccggattcaaaggcgggtttcaaagatcacttctgaaaaaccaccgggtaaaatcgagctgtccgaagaggttttgaaaacgtttgaaaagtggcgccgaggcggtctggattaggttgacgctttttcgcccattaatgtataatatttctatctacgtgcgccggggggatcgcagtgaatctacagaacagcaagggaaagttcaacaaagtgcaattttgccagttggaggacgagcaggtcattgaaaaggttcatgttggggatagtgatgcgttagattacttgattacgaagtaccgtaattttgtacgggcgaaagcaaggtcttattttttaataggggccgacagagaagatattgtacaggaagggatgataggcttatataagtctatccgagactttagagaggacaagcttacttcatttaaagcttttgcagaattatgcattacccgccagattattaccgcaataaagacagctacccgtcagaaacacattcctttaaattcctatgtttctttagacaaacctatttttgatgaagaatctgacagaacactgcttgatgtcatttcaggcgctaaaacgttaaatcctgaagagatgattattaatcaggaagaatttgatgatatcgaaatgaaaatgggagaactgctgagcgatctggagagaaaggtgcttgttttgtatttggacggaagaagttaccaagagatttcagatgacttaaaccgacacgtaaaatcaatcgataatgccctgcagcgcgtgaagcgcaagcttgaaaagtatttagaaataagagagatcagcctgtagcaggtttctgtgtcatattgacagaatttttctgactgtgctattttattaagataaatgaatgtttaggaaaaggtgtaacgacatgagaaaaaagattacgctggcatgcaaaacatgcggaaatcgtaattatacgacaatgaaaagctctgcatcagcggctgagcggttagaagttaagaagtactgcagcacttgcaattcacatacagctcatttagaaacaaaatagtgttcgctttttaaattgtggaggtcttttacatgcgcatgatgagtttctttaaagatgttgggaaagaaatgaaaaaggttagctggcctaaaggcaaagagttaacgcgctatacgatcacggtgatttcaacggttatcttttttgttatcttttttgccctccttgatacaggaatttctcaattaattcgtttaatagttgaataatgatcagcaatacgtgctataatagatcataatatcgtttgccaaaacccgttcagcgggttttttattgtgttgttgaaaaaaggattcataggccctgagcctattttttgttttacacttcatttttaaatgcggggagggaaggactgcagagtcctgatagaatggaaaagaattggtatgttgttcatacgtattccggttatgaaaacaaagtaaaagcgaaccttgaaaaacgtgtggaatcaatgggaatgcaggataaaattttccgcgttgtcgtccctgaagaagaagagactgatattaagaacggcaagaaaaaagtagtcaaaaagaaagtgttcccgggttatgtgcttgttgaaatcgtcatgactgatgattcctggtatgtggtccgcaacacgccgggcgttaccggattcgtcggatcagccggttcaggctcaaagccgactccgcttcttcctggcgaagcggaaaccatcttaaaacgcatgggcatggatgagcggaaaaccgacattgattttgaattgaatgagacagtcaaagtcatagacggacctttcgccaactttacaggatcaattgaagagattgattatgataagagcaaagtgaaagtattcgttaacatgttcggccgtgaaacgccggttgaattggaatttacccagatcgacaaattgtaatgtgaaaaaacttgaaattgctacatattaatgataatatagcaaaggtacgtcttggactaatccaaggcagctagcttgatatttcgtcattcatataaagaatgaaaccttgagtgggagggtttaccctattaccacatcacggacttaaggaggtgtgtctcgtggctaaaaaagtagtaaaagttgtaaaattgcaaattcctgctggaaaagctaacccagcgccgccagttggacctgcactaggtcaagccggtgtaaatatcatgggattctgtaaggagtttaacgctcgtacagctgaccaagctggtttaatcattcctgttgaaatttcggtttacgaagaccgttcatttacatttattacaaaaactccgcctgctgcagtattgcttaaaaaagcagctggaattgagtctggttctggtgaaccaaaccgtaataaagtggcaaccgttaagcgcgataaggttcgcgaaatcgctgaaacgaaaatgcctgacttaaacgcagcagacgttgaagcggcaatgcgcatggttgaaggtactgcccgcagtatgggtatcgttatcgaggattaatttgtttcttgtcgggttgcgagttttcacaagttcgcaacccttattcgtgggaggttattccgctataaccacataaggaggaaattttaaaatggctaaaaaaggtaaaaagtacgttgaagctgcgaagcttgtagaccgtgcgaaagcttacgacgtcgctgaagcagtggcgcttactaaaaaaacaaacacagctaaattcgacgctacagttgaagttgcttttcgtttaggggttgaccctcgtaaaaacgatcagcaaatccgcggtgcagttgtacttcctaacggaactggtaaaactcagcgcgtgcttgtattcgctaaaggcgaaaaagcaaaagaagctgaagctgccggtgcagactacgttggcgattctgattacatcgcgaaaatccagcaaggctggttcgaattcgatgtaatcgttgcgactcctgacatgatgggtgaagtcggtaaaatcggccgtgtgcttggaccaaaaggtcttatgccgaaccctaaaacaggaactgttacattcgaagtggaaaaagcaatcggcgaaatcaaagctggtaaagtagaataccgcgttgacaaagctggtaacatccatgttccgatcggaaaagtttctttcgaggatgaaaaacttgttgagaacttcacaacaatgtatgatacaatcctgaaagcaaaaccggctgcggctaaaggtgtttacgtgaaaaacgttgccgttacttctactatgggccctggtgtcaaagtagacgcttctactttcaacgtaaaataatatttgactttagatcagcattctgatatgattcaaaatgttgtaaaatataatatgtcatttataccgtagacagcaggggccgttgaggcttaatatcctgccgaggtgtatatatatcacagctattacgttacgtatgcttgtatatacagcctccatgtccacatggaggctttttatatgaaatcgtcgtcacagtcgtgatcacctagcggtataagtgttacacaaaatctacaggaggtgtaaccatgagcagcgcaattgatacaaaaaaagttgttgttgaagagattgcttctaaactgaaagaaagcaaatcaacgatcatcgttgactaccgcggacttaacgtttctgaagtaactgaactccgtaaacagcttcgcgaagctaacgtagagttcaaagtgtacaaaaacacaatgactcgccgtgcggttgaacaagctgaacttgatggtttgaatgatgtcttaactggaccgaatgcgatcgcattcagtactgaagatgttgtcgctccggcaaaagttcttaacgagttcgcgaagaatcacgaagctctggaaatcaaagcgggcgttatcgaaggaaaagtatcttctgttgaagaagtgaaagctcttgctgaacttccttcacgcgatggcttactttctatgttgcttagcgtacttcaagctccagttcgcaaccttgcacttgcagctaaagcagttgcagaacaaaaggaagaacaaggcgcttaatctgattttaccctaaaataaaacaaatggaggaatttcaaatggctttaaatatcgaagaaatcattgcttccgttaaagaagcaactgtacttgaattgaacgacctagtaaaagcaatcgaagaagaatttggcgtaactgctgctgctcctgtagctgtagctggcggagctgctgctggcggcgctgctgaagagcaaagcgaattcgaccttatccttgctggtgcaggttctcagaaaatcaaagttatcaaagttgttcgtgaaatcactggtcttggcttgaaagaagctaaagaacttgttgacaacactccaaaaccacttaaagaaggtattgcgaaagaagaagctgaagagcttaaagctaaacttgaagaagttggcgcttctgtagaagttaagtaatcttcacttgcctgtaggggaagctcgcttttatgaggcgggctttttctttgcttttctttaagtgccattataaaaggaggttctaataatgagtgatcactattattcagaaaaaccttcagttaaaagcgataaacagacatggtcatttacactgcggaacagatcttatacattcacaagtgacagcggcgttttctcgaaaaaggaagttgatttcggttcgcgtgtcttaattgaagcgtttgaagagccggagatcgatggtgacttcctggatgcaggctgcggttacggcccgatcggtctgtcactcgccggtgcatttacagaccggaccgtgcacatgattgacgtgaatgaaagagccgtagagctgtcaaatgaaaatgcagaaaaaaacggaataaaaaacgttcgaatttatcagagtgatttattttcaaatattgattctgctcaaacatttgcttctattattacaaaccccccaatccgcgccggaaaaaaagttgtccatgccatttttgaaaaaagcgctgagcatttaagggcttcaggtgaattgtggatcgttatacagaaaaaacagggcgggccttctgccattgaaaaactgaaggagctttttgacgaagtttctgtggttcaaaaaaagaaaggctattatatcataaaagcaaaaaaagtttgacttgaattttcagctatgttaatattgtaaaatgccaatgtatatattttgcatgatatgctgaaataatcatagtgcatgtataaattatacaaacatggaaatgctaataaaatcggtatttgtttttggatgtggttttcttaattagaaacccttttttcttttgtcttgtaaaagtatttctttatcgtaagagatgcttattacacatataatacgcatgatttgaggggtgaatcagttgacaggtcaactagttcagtatggacgacaccgccagcgcagaagctatgctcgcattagcgaagtgttagaattaccaaatctcattgaaattcaaacctcttcttatcagtggtttcttgatgagggtcttagagagatgtttcaagacatatcaccaattgaggatttcactggtaacctctctctagagttcattgactacagtttaggagatcctaagtatcccgttgaagagtcaaaagaacgtgatgtgacttactcagctccgctgagagtgaaggttcgtttaattaacaaagaaactggagaggtaaaagaccaggatgtcttcatgggtgatttccctattatgacagataccggtacttttatcatcaacggtgcagaacgtgttatcgtatctcagcttgttcggtctccaagtgtatatttcagtggtaaagtagacaaaaacggtaaaaaaggttttaccgcgactgtcattccaaaccgtggcgcatggttagaatacgaaactgatgcgaaagatgttgtgtatgtccgcattgatcgcacacgtaagttgccggttacggttcttttgcgtgctctcggcttcggttccgaccaagagattctcgatctcattggtgagaacgaatatctccgcaatacactggataaggacaacactgaaaacagtgacaaagcgcttcttgaaatctatgagcgccttcgtcccggagagccgcctacagtagaaaacgcaaaaagcttgctggattcccgtttcttcgatccgaagcgatacgaccttgcgaatgtaggacgctataaaattaataaaaagcttcatatcaagaaccgcctgtttaaccagcgccttgcagaaacactggtggatccggaaaccggtgaaattctcgctgaaaaagggcagattcttgacagaagaacacttgataaagtactgccatacttagaaaatggaatcggcttcagaaagctttatcctaacggcggcgtcgtcgaggatgaagtgatgcttcaatccattaaaatctatgctcctaccgatgcagaaggagagcagacgatcaatgtgatcggcaatgcttacatcgaagaggcgattaaaaacattacgcctgctgatattatttcttctatcagctacttcttcaacctcctgcacggagtgggcgacactgatgatatcgaccatctcggaaaccgccgtctgcgttctgtaggtgagctcctgcaaaaccaattccgtatcggtttaagccggatggaacgtgtcgtacgtgaaagaatgtctattcaagacacgaatacaattacgccgcagcagctgattaacatcagacctgttattgcgtctattaaagagttcttcggaagctcacagctttctcaattcatggatcagacgaacccgcttgctgaattgacgcacaaacgccgtctgtcagctctcggaccgggcggtttgacacgtgagcgtgcaggtatggaagtacgtgacgttcactactctcactatggccgtatgtgtccgattgaaacgcctgagggcccgaacatcggtttgatcaactcattgtcatcatttgcgaaagtaaaccgctttggtttcattgagacgccataccgccgcgttgatcctgaaacaggaaaagtaacgcctagaatcgactacctgactgctgatgaagaggataactatgtcgtagcccaagcgaatgctaagctgagcgatgacggttctttcttggatgacagcatcgtagcgcgtttcagaggggaaaacaccgttgtagcccgcaaccgcgtggattacatggacgtatctcctaaacaggttgtatctgctgcgacagcatgtattccgttcttggaaaacgatgactcgaaccgcgccctcatgggagcgaacatgcagcgtcaggctgtgcctttgatgcagccggaagctccgatcgtcggaacgggtatggaatacgtatccggtaaagactctggtgcagccgttatttgtaaacaccctggtatcgttgaacgggtggaagcgaaaaacgtatgggtgcgccgctatgaagaaattgacggccaaaaagtaaaaggcaacctggataagtacagcttgctgaaattcgtccgctccaaccaaggtacgtgctacaaccagcgtccgatcgtcagtgtcggcgatgaagtagtcaaaggagaaatccttgctgacggaccttcaatggagcttggtgaacttgctctcggccgcaacgtaatggtcggcttcatgacatgggatggttacaactatgaggatgccatcatcatgagtgaacgccttgtgaaagatgatgtatacacatctattcacattgaagaatatgaatcagaagcacgtgatacaaagcttgggccggaagagatcacccgcgatattccaaacgtaggggaagacgcgcttcgcaatcttgatgaccgcggaattatccgtatcggtgcggaagtcaacgacggagaccttctcgtaggtaaagtaacgcctaaaggtgtaactgagcttacggctgaagaacgccttcttcatgcgatctttggagaaaaagcgcgtgaagtccgtgatacttctctccgtgtgcctcacggcggcggcggaattatccacgacgtaaaagtcttcaaccgtgaagacggcgacgaacttcctccgggagtgaaccagcttgtacgcgtatatatcgttcagaaacgtaagatttctgaaggtgataaaatggccggacgtcacggaaacaaaggggttatctcgaagattcttcctgaagaagatatgccttaccttcctgacggcacgccgatcgatatcatgcttaacccgctgggtgtaccatcacgtatgaatatcggtcaggtattagaacttcacatgggtatggctgcccgctacctcggcattcacatcgcgtcacctgtatttgacggcgcgcgtgaagaagatgtgtgggaaacacttgaagaagcaggcatgtcaagagacgctaaaacagttctttatgacggccgtacgggagaaccgtttgacaaccgtgtatctgtcggaatcatgtacatgatcaaactggcgcacatggttgatgataaacttcatgcccgttctacaggtccttactcacttgttacgcagcagcctctcggcggtaaagcccaattcggcggacagcgtttcggtgagatggaggtttgggcgcttgaagcttacggcgcagcttacacgcttcaagaaatcctgactgtgaagtccgatgacgtggtcggacgtgtgaaaacatatgaagccatcgtcaaaggcgacaatgttccagagcctggtgttccggaatcattcaaagtattgatcaaagagcttcaaagcttaggtatggacgtaaaaatcctttcaggcgatgaagaagaaatagaaatgagagatctagaagacgaggaagatgcgaaacaagctgacggccttgcattatcaggtgatgaagcgccggaagaaacagcatctccagacgttgaacgtgacgcagtaacgaaagaatagtctctgattgataaaggcaagtgacatcggttaatccgaagataaaaagggaggtaggccccttgctagatgtgaacaattttgagtatatgaacatcggtcttgcttcaccggataaaatccgttcatggtcttttggtgaagtgaaaaagcctgaaacgataaactatcgtacgttgaaacctgaaaaggacggcctgttctgcgaacgcattttcggaccgactaaggactgggaatgtcattgcggcaagtacaagcgggttcgttataaaggcgtagtttgtgaccgttgcggagttgaagtaacgcgggctaaagtccgtcgtgagagaatggggcatattgaactggctgccccggtttctcacatttggtatttcaaaggtattccgagccgtatgggtcttgtattggatatgtcaccgcgtgcgctggaagaagttatttactttgcttcttacgtcgtaactgacccggccaatacaccgctcgaaaagaaacagcttttatctgaaaaggaataccgtgcgtatctggataagtacggaaacaaattccaagcctctatgggtgcggaagccattaataaacttctgcaggacatcgaccttgtcaaagaagttgatatgttaaaagaagagctgaagacttctcaaggacagcgccgtacacgtgcgatcaaacgccttgaagtgcttgaagccttccgtaattcaggaaacaagccgtcttggatgatcctcgacgtgcttccggttattccgcctgaattaagaccgatggttcagcttgacggcggacgtttcgcaacgtctgatctgaacgacctttaccgtcgtgtcatcaaccgtaataaccgtttaaaacgtctgttagacctcggcgcgccaagcatcatcgttcagaacgaaaaacgtatgcttcaggaagcagtcgatgctctgattgacaacggacgccgcggccgtccggttaccggaccgggtaaccgtccgcttaaatctctttctcacatgctgaaagggaaacaagggcgtttccgtcagaaccttctcggtaaacgtgtagactactcaggccgttccgttatcgtcgtaggtccgcatctgaaaatgtatcagtgcggtttgccgaaggaaatggcgcttgagctcttcaagcctttcgtcatgaaagagcttgttgaaaaaggccttgctcacaatatcaagagcgcaaaacgcaaaatcgaacgcgtgcagcctgaagtatgggatgtacttgaatctgtcattaaggagcatccggtcttactgaaccgtgcccctactcttcacagattaggtatccaggctttcgaaccgacgcttgttgaaggacgcgccatccgtcttcacccgttagtatgtacagcttataacgctgactttgacggtgaccaaatggcggttcacgtacctttatcagctgaggctcaagctgaggcgcgcattctgatgcttgcggcccaaaacatcttgaaccctaaagatggtaaaccggttgttacgccgtctcaggatatggtattaggaaactactacctgacgcttgagcgcgccggagcagtcggcgagggtatggttttcaaaaatacggacgaagcgcttcttgcttatcaaaacggttatgttcaccttcatacgagagttgctgttgcagcgaactcccttaagaatgtgacatttactgaagaacagcgttcaaaattgttaattacaactgtcggtaagctcgtcttcaatgaaattcttccggaatcattcccttacatgaatgaaccaacgaagagcaacattgaagagaagacacctgaccgtttcttcttagataaaggtgctgacgtaaaagctgtgattgctgagcagccgatcaacgcaccgtttaaaaaaggcattctcggtaaaatcatcgcggaaatctttaaacgattccatatcacggaaacgtctaaaatgcttgaccgcatgaaaaacctcggtttcagatattcaacgaaagccggcatcacagtaggggtttctgatatcgtcgttctcgatgacaaacaggaaatccttgaagaagcacaaagcaaagttgataatgtcctgaaacagttcagacgcggtttaatcaccgaagaagaacgttatgaaagagtcatttcaatttggagctcagcgaaagatgttatccaaggcaaactgatgaaatcattagacgaagtcaacccgatctacatgatgagtgactcaggagcccgtggtaacgcatctaactttacacagcttgcgggtatgcgcggtctgatggccaacccggctggacgaatcattgaattgccgattaaatcaagtttccgtgaaggcctgacagttttggagtactttatctccactcacggtgcgcgtaaaggtcttgccgataccgccctgaaaacagctgactcaggttaccttacacgccgtcttgttgatgttgcgcaggatgttatcattcgtgaaacagattgcggaacagaccgcggtattcttgcaaaaccgctcaaagaaggcacggaaatcatcgagcgtctggaagagcgtctgatcggacgtttcgccagaaaacagatcaaacatcctgaaacgggtgctgtgctcattaacgaaaatgaattgatcgatgaagataaagcgctggaaatcgttgaagccggaatcgaagaagtgtggatccgttctgcgttcacatgtaacactcctcatggtgtatgtaaacgatgctacggacgtaaccttgcaaccggaactgatgttgaagtcggcgaagcagtaggtattatcgccgctcaatctatcggtgagcctggaacacagttaacaatgcgtacgttccacacaggcggggttgccggagacgatatcacacaaggtcttccgcgtatccaagagcttttcgaagcgcgtaatccgaaaggtcaagcgacgatttctgagattgacggtacaattgccgaaatcaatgaagtccgcgacaaacagcaggagattgttgttcagggcgctgttgagacacgttcatacacggcaccttacaactcacgcctgaaagtggctgagggtgatcagattacccgcggtcaagtgctgacagaaggttctatcgatccgaaagaacttcttaaagtcactgacctgacaacggttcaggaatatcttctgcatgaggttcagaaggtttaccgtatgcagggggttgaaatcggcgataaacacgtagaagtaatggttcgccagatgcttcgcaaagtccgtgtgatcgatgccggagatactgatgttctccctggcacattgcttgatattcaccaattcacagaagcgaacaaaaaagtgctgcttgaaggcaatcgacctgctacaggccgtcctgtccttctcggtatcacaaaagcttcactcgagacggattcattcttgtctgccgcatcattccaagaaacaacacgcgttcttacagatgctgcgattaaaggtaagcgcgatgaacttctcggcctgaaagagaatgttatcatcggtaaactggttccggccggtaccggtatgatgaattacagaaaagtaaaacctgtttcaaacgttcagccttcggaagatatggttccggctgaataatagaaactgctgcaggaaaggctgtttcgacagcttttcctcagtattacaattattctggcggtggactgcactaaaaaatgtcatacgttgttgacatccgtcccgcagagtgataatataaccaaggtgctcgaaataaaacctgttactttggaggatatgtttatgtcttatgataaagtatcacaggccaaatcaattattattggtacgaagcaaacagtgaaagctctaaaacgaggttcagtgaaggaagtcgtcgtggcaaaagacgcggattcagttcttacagctggcgttatccagcttgcaaagaaccaaaataccgctgtctgtatggtggattccatgaaaaagctcggcaaagcctgcggaattgaagtgggagcagcagctgttgccattatgttatagcgtactttttgtttttatataagatatcaatcttgtgtaaagacattgttttttgcctaatgatgaaccacctgggtatgtgggttataaaacgtaatgaagggaggaacacaacatgcctacaattaatcagctaattcgcaagggacgcgtgagcaaagttgaaaactctaagtcacctgcactaaacaaaggatacaacagctttaaaaaagagcacactaacgtatcttctccacaaaaacgcggggtatgtactcgtgtgggtacaatgacaccgaaaaaaccgaactcagcacttcgtaaatatgctcgtgttcgtttgactaacggaatcgaggttactgcctacattcctggtatcggtcacaacctgcaagagcacagcgttgtactgatccgcggcggacgtgtaaaagacttaccgggggtacgctaccacatcgttcgtggcgcgcttgatactgccggagttgaaaaccgtgcacaaggccgttctaaatacggtacgaaacgtcctaaagcaaagtaatcaaataaatcattaaaactatgaagggaggatattcagatgccacgtaaaggtcctgtagcaaaaagagatgttttacctgatccgctttacaactctaagctggtatcccgcctgatcaacaaaatgatgatcgacggtaaaaaaggtaaatctcaaacaatcctatacaagtcattcgatatcattaaagaacgcactggcaatgatgcaatggaggttttcgaacaagcattgaaaaacatcatgcctgtacttgaagtaaaagcacgccgtgtaggtggagctaactaccaagtgcctgtagaagttcgtcctgaacgccgtacaactcttggtcttcgctggttggttaactatgcgcgtcttcgcggagaaaaaacaatggaagagcgcctggctaacgaaattcttgatgcagctaacaacactggcgctgccgttaagaaacgtgaagacactcacaagatggcagaagcgaacaaagcatttgctcactaccgctggtaggattcatataatcaaaataataattccctaataaggaaggagaaattacccaatggcaagagagttctccttagaaaaaactcgtaatatcgggatcatggctcacatcgatgccggtaaaacgactactacagaacggatcttgttctacacaggccgtatccacaaaattggcgaaactcacgaaggtgcttcgcaaatggactggatggagcaggaacaagaacgcggtatcacaatcacttctgcagcaacgactgcacagtggaaaggttaccgtgtaaacatcatcgatacaccgggacacgtagacttcacagttgaagttgaacgttcactccgtgtacttgatggtgcggttgccgtacttgatgctcaatcaggtgttgagcctcagacagaaacagtatggcgccaagcaacaacttacggagtgccgcgcgttgtatttgtcaacaaaatggacaaaatcggcgcagacttcctttactctgtaggcactttaagagaccgtcttcaagctaacgctcacgcaattcaattgccgatcggcgctgaagacaacttcgaaggtatcatcgacttagtagaaaacgttgcgtatttctacgaagatgaccttggaactcgttcagatgcgaaagaaatccctgaagagtacaaagagcaagctgaagagcttcgcagcagcctgattgaagctgtagctgagcttgatgaagagcttatggaaaagtaccttgaaggtgaagaaatcactatccctgaactgaaagctgctatccgtaaaggtacactgaatgttgaattctaccctgtacttgttggatctgctttcaaaaacaaaggtgttcagcttgtacttgatgctgttcttgactaccttcctgcgccaactgatgttgctgcaatcaaaggtgtacgtcctgacacagatgaagagatcgttcgtcattcttctgatgaagagccattctctgcacttgcatttaaagttatgactgacccttatgtcggtaagctgacattcttccgcgtatattccggtacacttgattccggttcatatgtaaagaactctacaaaaggcaagcgtgagcgcgtaggacgtatccttcaaatgcacgctaacagccgtgaagagatctctactgtttacgctggagacatcgcagctgctgtaggtctaaaagatacttctactggagatactctatgtgatgagaaggatcttgtaatccttgaatcaatggaattcccagagcctgttatcgacgtagcgattgagcctaaatcaaaagctgaccaagataaaatgggtatcgctttagcgaaacttgctgaagaagatcctacattccgtacacaaacaaaccctgaaacgggtcaaacaatcatctctggtatgggtgagcttcaccttgatatcattgttgatcgtatgaagcgtgagttcaaagtcgaagctaacgttggtgctcctcaagttgcgtaccgtgagacattccgtaccggtgcaaaagttgaaggtaaattcgtacgtcaatcaggcggacgcggtcagttcggtcacgtttggatcgaatttgaaccgaacgaagaaggcgctggctttgaattcgaaaacgcaatcgtcggtggtgttgttcctcgtgaatacatcccagccgtacaagcaggtcttgaagactctcttgaaaatggtgtcctagccggattcccgctaatcgacatcaaggcgaaactttttgatggatcttaccatgatgttgactcaaacgaaatggcgtttaaagtcgctgcttctatggcattgaaaaatgcagtcagcaaatgtaacccagttcttcttgaaccaatcatgaaagttgaagttgttattcctgaagaatacatgggagacatcatgggtgatgttacttctcgtcgcggacgcgtagaaggtatggaagctcgcggtaacgctcaagttgtgcgtgcgatggtacctcttgctgaaatgttcggttacgctactgcccttcgttctaacacgcaaggacgcggtacgttcacaatgttcatggatcactacgaagaagtgccgaagagcatcgctgaagaaattatcaaaaaaaataaaggcgaataattgattttgccacttaactcaagtataactactattgtaagatgaggaagtgagagcttgctttcactttctatcactctatacattactaattaaaagctcttaaggaggattttagaatggctaaagaaaaattcgaccgttccaaatcacatgccaatatcggtacaattggacacgttgaccatggtaaaacaacattaactgctgctatctcaacagtacttcataagaaatctggtaaaggtacagctatggcgtacgatcaaattgatggtgctccagaagaacgtgagcgcggtatcacaatctctactgcacacgttgagtacgaaactgacactcgtcactatgcacacgttgactgcccaggacacgctgactatgttaaaaacatgatcactggtgctgcgcaaatggacggagctatccttgtagtatctgctgctgatggcccaatgccacaaactcgtgagcacatccttctttctaaaaacgttggtgtaccatacatcgtagtattccttaacaaatgcgacatggtagacgacgaagagcttcttgagcttgttgaaatggaagttcgcgatcttcttagcgaatacgacttccctggtgatgatgtaccagttgttaaaggttctgctcttaaagctcttgaaggtgacgctgagtacgaagaaaaaattcttgaacttatggctgcggttgacgagtacatcccaactccagaacgcgacactgacaaaccattcatgatgccagttgaggacgtattctcaatcactggtcgtggtacagttgctactggccgtgtagaacgcggacaagttaaagtcggtgacgaagttgaaatcatcggtcttcaagaagaaaacagcaaaacaactgttacaggtgttgaaatgttccgtaagcttcttgactatgctgaagctggagacaacatcggtgcgcttcttcgcggtgtagctcgtgaagacatccaacgtggacaagtacttgctaaaccaggtacaatcactccacacagcaaattcaaagctgaagtttacgttctttctaaagaagagggtggacgtcatactccattcttctctaactaccgtcctcagttctacttccgtacaactgacgtaactggtatcatcaatcttccagaaggcgtagaaatggttatgcctggagataacactgaaatgatcgttgaacttatctctacaatcgctatcgaagaaggaactcgtttctctattcgtgaaggcggacgtacagttggttcaggcgttgtttctacaatcactgagtaatcgactcgttcattaatgcggggtcccttatggggcctcgtttttttgtttccccgctgattccatgtataatagaacgtatacaaattttaggagcagagcgatgaacgataacttcaagaaaaccaatcgtatttcaatgcttcagcaattgctgattaatggcagtgaacaaaccattatgattaatggtgatgacaggagtaatccgctgcttttgtttttgcacggcggtcccggcacgccccaaatcggctatgcgagaaaataccagaataagctggaaaagcatttcaccgttgtgaactgggatcagagaggggcgggtctctcttattcaaaggaaattccggcttcatctatgaccttggatcagctgacagccgataccattcatttgaccgaacgcttatgcaagcaattcagcaggcaaaaaatatatatcgccggctattcgtggggttcagttctggcgcttcatgttcttcaagagaggcctgatttgtattatgcgtatatcggtatcagtcaggtggttaatattcaaaaggaagaaacggaagcttaccggctgatgatggaatggagcaggcgacgcaaacatttcctgctggaaaagacgcttagctttatcggagcgcctccatgggagaaacagctgcagcgaacgttgtttctgctttgtatcgagatgaggggagggggctttacccatcatccgatcggtgctcttaaagcaggggggcgaatgctgtttggtgaaccgtacggtgtgagagggagtttcttagccgcgcggggacaaatgttcagcctgaaacacctgtgggaggatctcattttctttaatgccggggaatcagtttcttctattataataccgtgctgttttatgtcagggagatacgatttgacggtcccggggacgacgtcttatgaatattatcagaaggttgatgcgccgtataaagaatggcattggtttgagaactcagcccattcgcctcacttggaggaaccggatcgctttgccgaagttgtcagccggttcgcatcgttccatctttgaaagaaaacaggcatatccttgattaatcatggtatcacctgtataataatcaaagtgtgaaaaccacaaggttctttaaataaaccttgcaacatacgtctattttctgtataatagtgtatgttggtctttgactgcgatgaagtgagaggttgctgacacacccggccgctttgccatggcaaggtgatcaggtttttctcacggagaactgtctaacgtgatgtaggcgaaaaggagggaaaataatggcaaaacaaaaaattcgtattcgtttaaaagcatatgatcatagaatccttgatcaatctgcagagaagattgttgaaacggcaaaacgttctggtgccagcgtatctggtccgattccgttgccaactgaaaaatcagtttacacaatccttcgtgcggtgcacaaatacaaagattctcgtgagcaatttgaaatgcgtacacataaacgtttaatcgacattgtgaacccaacaccacaaactgttgatgctctcatgcgattagacttaccatctggtgtcgatatcgaaatcaaactttaattctaaaatatagaatgatcttaataggaggtgtgacgaatgaccaaaggaatcttaggaagaaaaattggtatgacgcaagtattcgcagagaacggtgatcttatcccggtaactgttattgaagcagctccaaacgttgttcttcaaaagaaaacagctgaaaatgatggctatgaagcgatccagcttggttttgacgataagcgtgaaaagctttcaaacaaaccggaaaaaggacacgttgcaaaagcggaaactgctcctaagcgcttcgttaaagaattacgcggcgtggatatggatgcgtatgaaattggtcaggaagtcaaggttgaaattttctctgcaggagaaatcgtagatgtaacaggagtatctaaaggtaaaggtttccaaggtgcaatcaagcgccacggacaatctcgcggacctatgtctcacggttcacgctaccaccgtcgtcctggttcaatgggacctgtagatcctaaccgtgtattcaaaggtaaactattacctggacgcatgggcggagatcaaatcactgtccaaaaccttgaaatcgtaaaagtagatgctgagcgcaatcttcttttgattaaaggtaacgtacctggtgcgagaaaaactttaatcactgttaaaagtgctgttaaatctaaataagtctcttaggaaaggaggaaattgatcatgccaaaagtagcattatacaaccaaaacggttctactgctggtgatatcgaattaaacgcgtctgtatttggaattgagccaaatgagagcgtagtattcgacgctattcttatgcaaagagcttccttacgtcaaggatctcacaaagtaaaaaatcgttctgaagtacgcggcggaggtcgcaaaccatggcgtcaaaaaggtacaggtcgtgcccgtcaaggttcaatccgttcaccgcaatggcgcggaggtggtgtcgtattcggcccaacaccacgcagctattcttacaaattacctaaaaaagttcgccgcttggcaatcaaatcagtattgtcttctaaagtgaacgacaacaacatcattgttcttgaagatcttactcttgatacggttaaaacaaaagaaatggcagctatccttaaaggattatctgttgagaaaaaagctttaatcgtaactgcggatgcaaacgaagcagtatctctttctgcacgcaacatccctggagttacagttgttcaagctaacggaatcaacgtgttagacgttgtcaaccacgagaagcttctgattacaaaagctgcggttgaaaaagtagaggaggtgcttgcataatgaaagatcctcgtgatgttcttaagcgccccgtcattactgaacgttctgctgatttaatgactgaaaaaaaatatacttttgaagttgatgtaagagctaataaaacagaagtgaaagatgcagttgaaagtatctttggagtgaaagttgacaaagtcaacatcatgaactacaaagggaaatcaaaacgtgtcggccgctacactggtatgactagccgtcgcagaaaagcgatcgtaaaacttactgcagacagcaaagaaatcgaaatttttgaagcttaattatctgtaaaaagaaggagggaaattcaaaatggcgattaaaaagtataaaccgacctctaacggacgtcgtggcatgacaacttcagattttgctgaaatcacgactgaccagccggaaaaatccttgcttgcgccccttcacaaaaaaggcggacgtaacaaccaaggtaaattgactgtacgtcaccaaggtggcggacacaaacgccaataccgtgttatcgacttcaaacgcgataaagatggtatacctggacgcgttgctacagttgagtacgatccaaaccgttcagctaacattgcactaatcaactatgtagacggagaaaaacgttacattcttgcaccaaaaggaattcaagtaggtactgaaatcatgtccggccctgaagctgacatcaaagtaggtaacgcacttccgcttatcaacatccctgttggtacagttgtgcataacattgaattaaaacctggtaaaggcggacagcttgtacgttcagctggtacatctgctcaggttcttggtaaagaaggcaaatacgttcttgtacgtcttaactctggtgaagttcgcatgatcctttctgcttgccgcgcttctatcggtcaagtaggtaacgagcagcacgaacttatcaacgttggtaaagcaggacgctctcgctggaaaggcatccgccctacagtccgcggttctgtaatgaaccctaacgatcacccgcacggtggtggtgaaggtcgcgcgccaatcggacgcaaatcaccaatgtctccttggggcaaaccgactcttggattcaagacacgtaagaaaaagaacaaatctgataaatttatcgtacgtcgtcgtaaaaataaataacggggttgtctacggttcatttcggaccgtagtgcaatcacgaagggaggttccaaaatggctcgcagcttgaaaaaaggaccatttgtcgatggacacttgatgacaaaaatcgagaaattaaatgaaacggacaagaaacaagttgtaaaaacttggtctcgccgttcaactattttcccacaatttatcggtcacactatcgcagtatatgacggacgtaaacacgtgcctgtattcatttctgaagacatggtaggccacaagttgggcgaattcgcaccgactcgtacttacaaaggccacgccagtgacgataaaaaaacaagacgctaagagaggaggcttttaaatgcaagctaaagctgttgcaagaacagtccgtattgctcctcgtaaagcacgtctagtaatggacctgattcgaggtaagcaagtaggcgaagcagtatctatcctgaacttaactccgagagctgcttctccgatcatcgaaaaagttttaaaatctgctatcgcaaatgctgagcacaactacgagatggacgctaacaatctggttatttctcaggcatttgttgacgaaggcccaacgttaaaaagattccgcccgcgtgctatgggacgtgcgagccaaatcaacaaacgtacgagccacattacaatcgttgtatcagaaaagaaggagggataagtagtgggtcaaaaggtaaatccagtcggtcttcgtatcggagtcattcgtgattgggaatctaagtggtacgctggtaaagattacgctgacttcctgcacgaagatttaaaaattcgtgaattcattagcaaacgcctttctgacgcttctgtttctaaagtagaaatcgagcgcgcagcaaaccgcgttaacattacgatccacactgctaagcctggtatggtaatcggtaaaggcggatctgaagttgaagcacttcgtaaagcccttaacagccttactggcaagcgtgtacacattaacattcttgaaatcaaaagagcagatcttgatgctcagcttgtagctgacaacatcgctcgtcaactagaaaaccgtatttctttccgccgtgcgcagaaacaacaaatccaacgcactatgcgtgctggagcacaaggtgtgaaaacaatggtttccggccgtcttggcggagctgacattgctcgttctgaatactacagtgaaggaactgttccattgcacactttacgtgctgacatcgactatgcaacatctgaagctgacacaacttacggtaagcttggtgtaaaagtctggatctatcgtggagaggttcttcctactaagaagaaaactgaggaaggaggaaaataatatgttattaccaaaacgcgttaaatatcgcagagagcatcgcggaaaaatgcgcggtcgcgctaaaggcggtactgaagtacattttggtgagtacggtatccaggctcttgaagcttcttggatcacaaaccgccaaatcgaagctgcacgtattgcgatgactcgttacatgaaacgtggcggtaaagtttggattaaaattttcccttcaaaaccttacactgctaaaccgcttgaggtacggatgggttccggtaaaggggctcctgaaggctgggtagctgttgtaaaaccgggcaaagttttatttgaaatttctggtgtgtctgaagaggtagctcgtgaagctcttcgtcttgcatctcacaaattgccaattaaaacgaagttcgtaaaacgtgaagaaattggtggtgaatcaaatgaaagctaatgaaattcgtgaccttaccactgctgaaattgaacaaaaagtaaagtctcttaaagaagaacttttcaatcttcgctttcaattagcgacaggacaacttgaaaatactgctcgcattcgtgaagtgcgcaaagctatcgcgcgcatgaaaactgtgattcgtgaaagagaaattgctgccaacaaataatcactgaggggaggtcgtgagcatgagcgaacgtaaccaacgcaaagtttaccaaggccgtgttgtttctgacaaaatggataaaaccatcactgttgttgttgaaacatacaaaaaggatcctatttacggtaaacgcgtaaaatactcaaagaaattcaaagcacatgatgaaaataaccaagctaaaatcggagacatcgtgaagatcatggaaactcgtccattatctgcaactaagcgttttcgtctagtagaagttgtcgaagaagctgttattatctaataaagttcggaattctttttccgaagggaggtaacaaataatgattcaacaagagactcgtttaaaagttgctgacaactccggtgcgcgtgaggtacttactattaaagttcttggcggttctggacgtaaaacggctaacattggtgatgtaattgtttgcacggttaaacaagcaacaccaggaggcgttgtcaaaaaaggtgaagtcgtaagagctgttatcgttcgcacaaaaagcggagcacgcagaactgacggatcatacatcagcttcgatgagaatgcatgtgttatcatccgtgacgacaagagcccgcgtggaactcgtatcttcggaccggttgcccgtgaattacgtgaaaacaacttcatgaaaattgtttctctggctccagaagttatctaatgaaataaatgccttactcaaggaggtgcgatcaggatgcatgtgaaaaaaggcgataaagtaatggttatctctggtaaagataaaggcaaacaaggtacgatccttgctgctttccctaaaaaggaccgcgttctagttgagggcgtaaacatggtgaagaagcactctaaaccaactcaagcaaaccctcaaggcggtatttctaatcaagaggcgccaattcatgtatcaaacgttatgccgctcgatcctaaaacaggtgaagtgactcgcgtaggatacaaagtggaagatggcaaaaaagttcgtgttgcaaaaaaatctgggcaagtcttagataaatagtatttaaaggaagggaggtctatctcatgaaccgccttaaagaaaagtacaataaagaaatttcacctgctttaatgacgaagttcaactacgactctgttatgcaggtgccaaaaatcgaaaaaatcgtaatcaacatgggtgtcggtgatgctgttcaaaacgcaaaagcaatcgacagtgctgttgaagaattaacgtttatcgcaggtcaaaaacctgtcgttactcgtgcgaagaaatcaattgctggattccgtcttcgtgagggaatgcctatcggtgcgaaagtaactcttcgcggagagcgcatgtatgatttccttgataaacttatttctgtatctttaccgcgtgtacgtgacttccgcgggatttctaagaaatctttcgacggtcgcggaaactacactcttggtattaaagaacagttaatcttccctgaaattgactacgataaagtaacaaaggttcgcggaatggacatcgttatcgtaacgactgctaactctgacgaagaggctcgtgagctattaactcaagtaggtatgccgttccagaaataatcaatgaaagggaggcgaaatcgtggctaaaaagtcaatgattgcgaaacaacaacgtacaccaaagtttaaagtgcaagagtacactcgctgtgaacgctgcggacgtccgcactcagtcattcgtaaatttaaactttgccgtatttgtttccgtgagcttgcatataaaggacaaattcctggcgtgaaaaaagccagctggtaatccccaagaatgggaaggaggtaattatataatggttatgacagatccaattgcagatatgctgactcgtattcgcaatgcaaacatggtacgtcatgagaagcttgaaattcctgcttctaaattgaaaagagaaattgctgacattttaaagcgtgaaggtttcattcgtgacgttgagttcgtagaagacagcaaacaaggtatcatccgcgttttcttgaaatacggacaaaacaacgagcgcgttatcactggtcttaaaagaatcagcaaaccaggtttgcgtgtatacgctaaatcaaatgaagtacctcgcgtacttaacggtcttggaatcgcgattatttctacatcacaaggtgttttaacggacaaagaagcccgtgcaaaacaagctggtggagaagttctagcatacgtttggtaagaagtttaacaagaatggaggtgttttagtatgtctcgtgtaggtaaaaaactgcttgagatcccttctggagttacagtaacgctgaacgaaggcaacactgtagctgtaaaaggaccaaaaggagaattaactcgtactttccatcctgatatggaaatcaaaattgaggacaacgtgcttacagttactcgtccttctgatcacaaagagcaccgtgcgctgcatggtacgactcgcagtctgcttggaaacatggttgaaggcgtatctaaaggatttgaaagaggtttggaattagtcggtgtcggttatcgtgcggctaaatccggaaacaaacttgttttaaacgttggatactctcaccctgttgagatcgttcctgaagagggcatcgaaatcgaagttccttctcaaactaaagtagttgtaaaaggtacagacaaagagcgtgtaggagctatcgctgctaacatccgcgctgtacgttctccagagccttacaaaggtaaaggaatccgctacgaaggtgaagttgttcgccgtaaagaaggtaaatctgctaagtaagaccgcttaaagtgaagaaaggagtgacctaaggatgattacgaaaactagcaaaaatgctgctcgtcaaaaaagacatgcccgtgttcgtgctaaactttcaggcacagctgaaagacctcgtctgaatgtgttccgttcaaacaaacacatttatgctcaaatcatcgatgatgtaaatggcgttacacttgctagtgcctctactctcgataaagatttgaacgtggaaagcactggtgacagcgctgctgctgctaaagtcggtgaactcgttgcgaaacgcgcttctgagaaaggtgtttctgacgttgtatttgaccgcggcggatacttataccatggacgtgtaaaagctctggccgatgcagctcgtgaagccggactgaaattttaataaaaaaaggagggacacatgattatgcgtcgtattgacccaagcaaattagagttagaagaacgcttagttacggttaaccgcgtagcgaaagttgttaaaggtggtcgtcgtttccgtttcgcagctctagtcgttgtcggtgacaaaaacggtcacgtaggtttcggtactggtaaagcacaagaagtacctgaagcaatccgcaaagctgttgaagatgcgaaaaagaatttgattgaagtaccaatggttggaactacgattccacacgaaatcatcggacgtttcggtgcaggcaatatcttgttgaaacctgcttctgaaggtactggagttatcgctggaggccctgtacgtgcggtacttgagcttgctggcgttgctgatatcctttctaagtctttaggttctaacacaccgatcaacatgatccgtgcaacacttcaaggtttaagtgagcttaaacgtgccgaagaggttgcgaagcttcgtggaaaatctgtagaagaactgttaggataaggagggaacattaatggctaaattagaaattaccctcaaacgcagtgtaatcggtcgcccggaagatcagcgcgttactgtaagaacacttggtttaaagaaaacaaaccaaactgtcgttcatgaagataacgctgcgatccgcggtatgattaataaagtatctcatctagtttctgttaaagaacaataaaaataaattataggctaaggaggtgtcctaatgaaacttcatgaattaaagccttcagaaggttcacgtaaagtacgcaatcgcgtaggtcgtggtattggttctggtaacggtaaaacagctggtaaaggtcacaaaggtcaaaacgctcgttctggcggcggtgtacgccctggattcgaggggggacaaatgcctttattccaacgtcttcctaaacgcggttttacaaacatcaaccgtaaggattacgctattgtgaacgtagacaaattgaacggttttgcggaaggaacggaagtcactcctgaacttcttcttgagactggtgttattagcaaacttaatgcaggagtaaagattcttggcaacggtaaattagagaaaaaattaactgtaaaagccaataaattctctgcttctgcgaaagaagctgttgaagctgctggcggtacagctgaggtgatctaacttgtttaagacaatctccaactttatgcgtgtgagtgatattcggaataaaatcatttttacattactcatgcttatcgtctttcgcataggtgcgtttatccctgtgccatatgtaaatgctcaggcgttgcagacacaaagttcgatgggggtttttgatctccttaacacatttggcggcggtgcgctttatcagttctccatttttgcgatgggaattacgccttacatcactgcttcaatcatcattcagctgcttcagatggatgttgtgccgaagtttaccgagtggtctaagcaaggtgaagtaggccgccgtaaattagctcagttcacgagatattttacaattgtgcttggttttatccaggcattaggtatgtcttacgggtttaacaacctggcaaacggtatgctgattgaaaaatccggcatatcgacatatctgattattgctttagtactcactggaggaactgcttttttaatgtggctgggcgaacaaattacttccaatggagtaggtaacggaatttcgatcatcatcttcgcggggattgtggctagtattccgaaaactgttgggcagatttatgagactcaatttgtcggcagcagcgatcagctgtttattcatattgtaaaaatcgctttactggtgattgcgattttggccgttattgttggtgttattttcattcagcaggccgtacgcaaaatcgcgattcaatatgcaaaagggcaaggtcgttcacctgttggcggaggccagtcaactcaccttccgcttaaagtgaatccggcaggggttattccggtaatctttgcggttgcgtttcttattacgccgcgtactatcgcgtcatttttcggagagaacgatgtgacaaagtggattcaagccaactttgacaatacacatccggtgggcatggcggtttatgtcgcattaattatcgcctttacgtacttctatgcttttgtgcaggtaaaccctgaacaaatggctgataaccttaaaaaacagggtggctatatcccgggggttcgtccagggaaaatgactcaagatagaattacgagcattttgtatcgacttacgtttgtgggttctatattcttagccgtgatttccattcttcctatctttttcattcaattcgctggattgcctcaaagtgcacagattggcggaacatcattgttaattgtcgtcggggtagccttggagacaatgaagcagctggagagccagttagtgaaacgtaattaccgaggatttatgaaaaattagaggactggttttaaccattcctctaaataagagaggacgggggaaatccgaatgaacttagtcttaatgggacttcctggagccggtaaaggcacacagggagaacgaattgttgaggattatgggatacctcatatctcaacgggagatatgttccgtgctgctatgaaagaagaaacaccactcggactcgaagcaaagtcttatattgataaaggcgagctcgtaccggacgaagtcacaatcggcattgtcaaagaaagactaggcaaagatgattgtgaaagaggttttcttctggacggatttccgcgaacagtcgctcaggctgaagctcttgaaaacattcttgaggaatacggcaagccgattgattatgtcattaacattaaagtagacaaagactctttaatggaacgtttgactggacgcagaatttgcagtgtttgcggcacaacctatcatttggttttcaatccgccgaaaacgccgggtgtttgtgataaagacggaggagacctttatcaacgggcagatgataatgaggaaaccgtctcaaaacggcttgaggtcaacatgaagcagactcagcctttactcgatttttattctgagaaagggtatcttgtcaacgtcaatggccagcaggacattaacgacgtgtacaaagatgtgaaagagcttcttggaggattgagcaaatgattatctgtaagacccctcgtgagcttggcatcatgcgggaagcagggcgaatcgtggctttgactcatgaagagatgaaaaagcacattaaaccaggaatctcgacaaaagaattggatcaaattgccgaacgttttattgagaagcagggtgcaatcccatcttttaaggggtataatgggtttcgcgggagcatctgtgtatcagttaatgaagaactcgttcacggaatacccggtaaaagggttttacgtgacggtgacattatcagcattgatatcggtgctaaattaaatggttatcatggtgactctgcttggacatatccggtaggaaacatcagtgatgatgataaacgactgctggaagtaacagaggagtctttatataaaggcttgaaggaagcaaaaccaggtgaacgtttgtcgaatatttcccacgcaatacaaacgtatgtcgaaaatgagcagttttcagttgttagggagtatgtcggacatggtgttggtcaagacttgcatgaggatccgcaaattcctcattacggtccgccaaacaaaggacctaggctgaagcctggtatggttctcgctatagaaccgatggttaacgctggcagccgatatgtgaaaacattggctgataactggacggttgtaacggtagatgggaaaaagtgtgctcattttgaacatacgattgcgattacggaaacgggttttgatatactgacaaaagtctagatgatgaaatgaattccttgacacatgttttcattccgcacctgggcagattgtaggtttacaattggtcggaagaaaaacaggctagctgctgtcatcggaatgaagattcatcatcgtgtactaaagcagacggagaaaagcgtacatttcattctccttagaaaaagaatatcaatcattcaccctttatgattgcgtatctccggaagttcagaacagtataaacgaaacagggcgtgtgacaaacggataactgagattttctcttttgaaatttgtcagagagcaagttactgatttgaagaagggagaacacttgaatggcgaaagacgatgtaattgaagtggaaggtacgattgtcgaaacactgccaaacgcgatgttcaaagttgaactcgaaaatggccatacggttttggctcacgtatctggtaaaatccgcatgcacttcattcgcattttacctggagacaaagttacggtagaattatctccatatgacttaactcgtggcaggattacgtaccgttacaaataaagcactccggaaactgaaggaggttggaaacacatgaaagtgagaccatcagttaaaccaatctgcgagaaatgtaaagttattcgcagaaaaggaaaagtaatggtgatctgtgaaaatccaaagcataaacaaaaacaaggataattaataaggaggtgcccagagaatggctcgtattgctggtgtagatatcccacgtgacaaacgtgttgttatttctttaacatatgtcttcggaattggccgcacaacggctcagcaagtcttgaaagaggctggtgtttctgaagatactcgtgtgcgtgatcttactgaagaagaacttggtaaaatccgtgatgttattgacaaactgaaagtagaaggtgaccttcgccgtgaagtttctcttaacatcaagcgtctgatcgaaatcggaagctaccgcggaatccgccatcgcagaggtttgcctgttcgcggacaaaactctaaaaacaatgcgcgtactcgtaaaggtccgcgtcgtactgtagctaacaagaaaaaataagtaagggaggtacctaaacaatggctgctgctcgtaaacaaaacacgcgtaaacgtcgcgtgaaaaagaatattgagtcaggaatcgctcatattcgttcaactttcaacaacacgatcgttacgatcactgatactcatggtaatgctctttcttggtcaagtgccggagctctaggattcagaggttctcgtaaatctactccttttgctgcgcaaatggctgctgaaacagctgctaaaggttcaatcgaacacggacttaaaactcttgaagtaactgttaaaggaccaggttctggccgtgaagctgcaatccgtgctttacaagctgccggacttgaagttacagctatcagagacgtaactcctgttcctcataatggatgccgtccaccaaaacgtcgccgcgtgtaatttgtttgtatagattttgtgtccctgtcaataatgggttatgatacagttatttatgaaacgaatgcaccgactcgttgcctgagcacatacgggactaaacaatggggaatttcggatggaatctcatatgattctattcgaggtttcgacgttttgaaggagggttttaagtaatgatcgagattgaaaaaccaaaaatcgaaacggttgaaatcagcgacgatgccaaatttggtaagtttgtcgtagagccgcttgagcgtggatatggtacaactctgggtaactccttacgtcgtatcctcttatcctcactccctggtgccgctgtaacatcgatccagatagatggtgtactgcacgaattctcgacaatcgaaggcgttgtggaagatgttacaacgataatcttgcacattaaaaagcttgcattgaaaatctactctgatgaagagaagacgcttgaaattgatgtacagggcgaaggaactgtcacagcagctgatattacacacgacagcgatgttgaaatccttaatccggatcttcatatcgcgactcttggtgagaatgcgagtttccgagttcgccttactgcacaaagaggacgtgggtatacacctgctgattcgaacaaaagagacgatcagccaatcggcgtgattccgatcgattcaatctttacgccagtttctcgtttatcttatcaggtagaaaacactcgtgtaggccaggttgcaaactatgacaaacttacacttgatgtttggactgacggaagcactggaccgaaggaagcaattgctctcggttcaaagattttaactgaacaccttaatatattcgtcggtttaactgacgaagctcagcatgctgaaatcatggttgaaaaagaagaggatcaaaaagaaaaagttcttgaaatgacgattgaggaacttgacctttctgtccgttcttacaactgcttgaagcgtgcgggcattaacacggttcaagaacttgcgaacaagacggaagaagatatgatgaaagttcgcaacctgggacgcaaatcacttgaagaagtgaaagcgaaactagaagaacttggactcggccttcgcaaagacgattgatctagtttccatgtgaactaggattttcgtgtgttttttatttagaaacagcattccattaaaggaggggacatcacatgtcatacagaaaactaggacgtacgagttcacagcgtaaagctatgcttcgtgatcttacaacagatttgatcatcaacgaaagaattgaaacaactgaaacacgtgcgaaagaacttcgctctgttgttgaaaagatgatcactcttggtaagcgcggtgacttgcatgctcgtcgtcaagcagctgcatacattcgcaacgaggttgctaatgaagaaaataaccaagatgcacttcaaaaattattctctgacattgcaactcgttacgaggagcgccaaggcggatacacacgtattatgaagcttggtcctcgccgtggtgacggtgcaccaatggcaatcatcgaattggtttaatcacatatttttgtgtatctaaagaagggcgggacagtttctaactggatctatgccctttttttagatatcagaactttttatcatgagacagaaaagcagagctatagctgagaggaggtcaggcgcccgtggatcaaaaacagcttatatccgtaaaagacattctattccgctaccgcaaagatgcagaaagaccggcgctggacggtgtgagtctggaggtatacgaaggagaatggcttgctatcgtaggccacaacggttcagggaagtcgactttggccagagcgctgaacggactgattttgcccgaggccggagaaattgaagtcggcggcatcaaactgactgaggataccgtgtgggatgtgcgaaaaaaaatagggatggtctttcagaatcccgataaccaatttgtcggaacgactgttcgcgatgatgtggcttttggtttagaaaacaatggtgttccgcgcgaagaaatgattgagagagtagattgggctgtcacacaagtcaatatgcaggattttcttgatcaagagccgcaccatctctccggaggtcaaaaacaaagagtggcgatcgcgggaattattgccgcgcgtcctgatattatgattttggatgaagcgacatccatgcttgacccgattgggagagaagaagtccttgatactgtcagacgcttaaaagatcagggcatggccaccgtcatttcgataacacatgacctggaagaagccgcaagggcggacaggatcattgtgatgaacggcggcaggaaatatgcagagggcacgcctgaagagatttttaaattaaacgaagacttggttcgcatcggtcttgatttgcctttctcattccagctcagcctgcttttgaaagaaagcggactggcgttaacgaaaaaccatctgactcaggaagggctggtgaatgagctgtggacattaaaatcaaagatgtagaacaccgctatcaaatgaagacaccgtttgaacggctggctctgtatgatatcaatgccgtgataaaagagggcagctacgttgccgtcatcgggcatacagggtcgggcaaatcgacgctcctgcagcatttaaacgggttgctgaaaccgactaaaggacagcttgaactcgggagcacgattctggcagccggtaaaaagaataaagatcttaagactttgcgaaaaaaagtcggaatcgttttccaatttcccgaacatcagctgtttgaagagactgtgctgaaggacatcgcattcggaccgatgaattttggtgtaaaaaaagaagacgctgaacggaaagcaaaagaaatgctgggacttgtgggccttccggaagacattttggatcgttcaccatttgagctcagcggcggccagatgcgcagagtggcgattgccggcgttctcgcgatggagccggaagtgctggttttggatgaaccgacggccggtcttgatccgagagggcgtcaggacattatggacatgttctatgcgcttcatcagcggggaaacctgactaccgttctcgtcacccacagcatggaggacgccgcccgttatgccgacgaaatgatcgtcatgcacaaagggaccattaaagcgacggggagtccgcgtgacttgtttgtaaaaggtgaagagatggccgaaatgggactggatcttcctgaatcggtgaagtttcagagacggcttgaggaggctctcggagtcaagtatgaaaaacccatgctgaccctgcaggatgccgccagtgaaatcaaggctttctttcaggaggaaaaggaccaatgatggacagcatgattatcggaaagtatgttcccggatcatcgcttattcaccgattggacccgcgaacaaaacttgtcagcatctttctttttgtatgtatcgtttttttggcaaacaacgtacagacgtacgctttgctcggtttgtttacattcggggtgatcgccttgactcgcgtgccgttcagctttttgctgaaggggcttaagccgattatctggattgtggcgtttacctttttattacacattttcatgacgcatgaaggatctgtcatttttcagcttggctggtttaaagtgtatgagggcggacttatacaggggatttttatctccctccgtttcgtttaccttatctttatgacgacgctgctgacgctgacaacaacgccgattgaaataacggatggaatggagcagctcctgaatccttttaaaaaggtgaagctgcccgtacacgaactcgcattgatgatgtcgatatcattgcgatttatcccgacattgatggaagagacagataaaatcatgaaggcgcaaatggcgaggggtgcggactttacaagcggcccggtgaaagacagaatcaaagcggttgttccgctgcttgtcccgctgtttgtcagcgcctttaaacgtgcggaagagcttgcggtcgccatggaggcgagaggctaccggggcggtgaggggagaacgaaatacagaaagctcgtctggaccggaaaggataccggagccattctgctcatcatcgtattagccgtgttattgtttttcttaagaagttagaggtgctgctgaatgagagtgaaatgtaccattgcttatgacgggcatttatttaacggatatcaggttcagcctggaaagcggaccgttcaaagtgaattggaaaaagcgctggccgtcatccataaaacggacggcagagtgcctgtgtactcatccggccgcacggacagcgatgttcatgctgccgggcaggtcattcattttgatacaccgctgtccatcccggctgagaaatggccgtttgcgctcaatgccctgctgcctgatgatattgccgtcaaaacagcagagattgcggatgatgggttccatgcacgatttagcgcggtccaaaaggaatatcgctactttgtatatacggagaaacacccggacgtatttaaacgacattacgcttaccattttgcatatccgcttaatgtgcagaaaatgagggaagcttcaaggcacctcgtcgggacacatgatttcacaagcttttgcgcggctgataccgcggttcaggataaagtcagaacgatttacgagctggattggactgagaccggagacggcctgcagatgcggatcaccggaaacggttttctctataatatggtcagaatcattgccggaacgttattggatacaggagctggaaaattttctcccgatgatgtaaaagcaatgctcgaagcgaaggatcgcgaagccgcggggcgcaccgcaccggggcacgggctgtatttatggagcgtttgctatgacaactaaaccaggtgtaacattttcttgacagagtctgcataaagttataagatatcatatggtatgtatttcaaccccacgataagccccggaacttattgtgttgtgaaatagaacgtaatcgaagattattgaaaatgacagattatttaggagggaaattcaatgcgtacaacacctatggctaacgcaagtactattgaacgcaagtggttagttgttgatgcagcaggcaagactttaggacgtctttctacagaagttgcatctatccttcgcgggaaacacaaaccgacttacacaccgcacgttgatactggagatcatgtgatcatcatcaacgctgaaaaaatcgagttaactggtaaaaagttaactgacaaaatctactaccgtcacactcaacatccaggcggattaaaatcaagaactgctcttgaaatgcgtacaaactaccctgagaaaatgcttgagcttgctatcaaaggcatgcttccaaaaggttctctaggtcgtcaaatgttcaagaaattgaacgtataccgtggttctgagcatccacatgaagcacaaaaacctgaagtttacgaacttcgcggttaattaaaaaggaggttaccaatttggcacaggttcaatattacggtactggccgtcgtaaaagttctgtagcgcgtgtgcgcttagttccaggtgaaggtcgtatcgtcgttaataatcgtgaaatcagcgagcacattccatctccagctctaatcgaagatatcaaacaaccattaactttaactgaaacagctggtacttatgatgttttagtaaacgtacatggaggcggcttatctggtcaagctggagcaatccgtcatggtatcgctcgtgctttgcttgaagcagatccagaataccgtgcaacacttaaacgtgctggtcttctgactcgtgacgctcgtatgaaagaacgtaaaaaatacggtcttaaaggcgctcgtcgtgcacctcagttctcaaaacgttaatcgttttggatggcaaaaaccacaacttcttggttgtggtttttttgtatttttttctcatattcaagaggttatccgatgtttttctagaattgtttgttatactctattcattaccaataaggagcgcagttataatgaataagttagtcatacataacagcaaggcatgggataaaaaagtcgaaacaggcaatgaatggacggttgcggttgattcccatacgattggtgaagcgaaaaaaggcaattggagcatcagaatgacccccggaaaagatgtgccggcggattggtttccgcccataggcggtctgaaggttctttgtctcgcttcaggaggaggacagcaagggccggttcttgctgctgcaggagcggacgtgaccatctttgacaattcggaaaaacagcttgcgcaagacagaatggttgccgagcgggacgatcttacgctgcggactgtcaaaggcagcatgaatgatctgagctgttttgatgatgagtcatttgattttatcgtgcacccggtatcgaattgctttgttgatacggttcttccggtatggaaagaagctcatcgcgtattgaaaaaaggcgggtctttagtctccggttttgtaaatcccgtcgtgttcttatttgatatggatttagagcaggaaggcgtactaaaagtaaagtattccattccgttttcggatgaaaaagatctgagtaagaaaaaggtaaaggaacttattgataatcatgaagcgcttgaattcggtcatacgctggaggatcaaattaaaggtcagattgacgcaggcttcatggttgccggtttttacgaagacaaaggcggcctcgtgctggatgaatacattaatacatactccgtaacaagaagcattaaaatataaaaacggcatcccgtcagaggtgctgtttttttgcggctttttcctgcggacggctgatcacattagccgaaaccggttctattccaatttctctggcccaaaccgacagttgtcccatatggtgaatctcatgcgcaaggatgtggcggagaatatcttctttaggaaaggtttggtccatccattccggcttaacaagatccggtcctttgcgggagaccgcatgaatgacatccttccgatattgttcagacagctttctgagatcctgaatgctcgtatagtcagactcagcaggtaaaacatcatctttacctaaaatggcacgagcccagctgatctcgacatcaatgatatgaaataaagtgcgcaagatgctcttcattccgcccgtccgggttttcgtcagttcctcccggctcagcttttcacatatcataaaccactcgtcacgcaccgtccaattgtattgaaacagctttttcataacgtcacctcagctctttcttcttccagttaacataaaactccttcatttgggaggatttccactatcaacaaagcatgctttttcccttttcctttcaaaataacagtaaaaaggagcgtggctggcaatggcagaagtattatctttttcagacgtgaaacgccagaaggattttgagcttgagaagagtttactaaaggagctgtcactgacgcagatcattcagtccgtaaaagcatgtcttacgcctttgtttccctttcttcaagacgaaaacggcattctgagtgaaggatgcatagattttgcaattgaagcgtatttattaggcggccggttcggcgtctttggctattatggtgagtccttgcagagggcaaacgcccgttcggcagaagaagaggaagaactgacggtcgatttttttgaatatctttgcaattggacgcatgagcaatattcttccgttgaacaaaaagaaatctatgaagcgtcctgccggtttatcaacagctggtggacggaaggatttctgcaaagagaaaaacaatgtaagctccgcatgaggtaatcataatttcttcccttgtcccatacttattaataacggggacaagcgggagggaaaggtatgacaaaaaagctgaaatggctcggttttttacttggctttatcatattattgtgtttattccggtttcaattccataatgatgattcctggcggccgtggagtctgccgctgagcgggaaaatcatctatctcgatccgggacacggcgggccggacggaggcgccacgggaggcagtcaccttgaaaaggacattactctcgaagtggcctccagggtcagagactatttgcaggagcagggagctttggtcattatgacgcgggagacggatactgatttagctcctgaagggacgaaaggctacagcagacgcaaagcggaagatctgagaaagcgcgtggaaatcatcaaccgttcagaggcggagctttatatcagcattcatctgaacgccataccgtcaccgagatggagcggcgcccaaagcttctactatggaaaatacgaagagaatgaaaaagtggcaaaatatatacaggacgaattgagaatcaatttggagaatacaacgagaaaggcgaaacggatacacggcatttacttaatgcagaatgtaaccaaaccgggcgcgctggtggagatcggatttctgtccaatcccgcggaagcgaaaaggctcggccagcccaaatatcaggacaaaatcgcttcttccgtgtataagggcgtattgagatacttcacagagaaaggagaccctcccgagtaaggagggtttttcgccgattctatgtttaatatatggtataataccatttgtaaacgaatacacaaagggtgagggttcgatgataagagaagatgaagtaagaaatatagtcggaaacatgcgcgaaccttttcttcatagaccgctgggagaattggatgccattaaagaagtaaagatcaagccggaaaaacggcatgtcagtgtgaaaattgcattggcaaaaacggggacggctgaacagatgggtattcagcaggaaatcgtatccgttctgaaagaagcgggtgcggaaactgtgggactgcggtttgaagagctgccggaagaaacattggagaaattcagccggccggctgctgaaagcgaaaccctgctgaataggaaacatccgccggtctttcttgcggtggcaagcggaaaaggcggtgtcggcaaatcaacggtttccgtcaacctggccatttctcttgcgcggctcggaaaaaaagtcggcttgatcgacgcggatatatacgggttcagcgtgccggacatgatgggtattacagtccgcccgacagtagaaggagaaaaactgcttcctgtcgaaagatttggagtaaaggttatgtcgatgggctttttcgtcgaagaaaacgctccggttgtgtggagagggccgatgctgggcaagatgctgaataacttcttccatgaagttgactggggagaggttgactatatcgttcttgatctgccgcccggcacgggtgatgtggcgctcgatgtacacacgatgcttccgagctgcaaagagattatcgtatcaacgccgcaccctacagctgcatttgtagcggcgagagcgggttctatggcgattaagaccgatcatgaagttgtaggggtcattgaaaatatggcttactatgaaagtgcaaaaaccggcgagagagaatttgtgttcggtcaaggcgggggagataagctttcagaggaattgcaagtgccgctgcttggcagaattcctttaaagcagcctgattgggacaaggatcagttcgcgccttctgtctatgacagaagtcatccgatcggggaaatttatatggggatcgcccagaaagtcattgaaaaaacagctgaataaaaaaggggccgggatcaacacggcccggccttttattggctttctttttcagagcttgaagctgcttttttcaattcatcctcgaattgctttttgaaaagcgggctggaaagtgtctctgtaattacatcttctaagtaactgcggaacttttggcttttcaccagctcatagtattttttatccatgccggggtcctgcatgatctgcataaaacttttctgataatcagggtctttcatcagtttttttatgattttttcgtgctcgggctgaagagtttttgcaaagctctcggcgaattttgagtcttcaaagatggttttccagaactccgccccttttttagaggtgagggttttctctattgtgcctttaatggcattttgatcaatcaccaatgcctcattcatcgcatcatcatttaatatttccttaattgccttttttccatcatcggtctttaatatatcaacaaccatttttttagtctggtcataatccatatccgctgcttggtcttttggagcacaagctgttacagataataaaacaaaacagcttatcaatagcgttttggcttttgacatgcataagctccttccttacttgtacttatttttaatatgattcatcggaatggatttatacataacaaaatatcgctgaacgcgattgtcagggggatgaataagagatgaaaagccgcgggcttgttcgatttttcttttcgattttagctgtgggcgctcttattacaagcgtcgtgggatttgctctgaagtggggggagtacaaggggttctttctgaattttgaggccggtcagattttctccgttctgatctggtttatcggggtaggcatgattttcagtgtgatcagccagatgggattcttcgtttttttgacggtgcaccggtttgcccttgaaattctcagatcaagctcgctttggaatctgcttcagctgtttatcattttgtttgtcgcttttgatttaatgtacgtcagatttttgtttttcggggagcgggatgactcgattgcagggtttgtctggctgccgctggctctgcttgccgtcggcctgttgacggcatatataaaacaaaagcagtcctcaaaaaatacgttcgtttcatcattatttttaatggtcgttattacagcgcttgaatgggttcctgcgctacgagtgaataatgaggactggctttatttgatgctgattccgctgatgggctgcaatgcgtttcagctgctaatgctgccgaagtttgcccagaggtaattatttcacttctgatgacttgacgtcagtatttgcgatcaggtcgccgacggtcacgtttttcagtcctttttgctttaaattgtgaatgatggcggggagggcttcttcagtctgtgttgctgaatcagaggcgtgcagcagaacaatgtcgccgccttttatatgactgtttacattttcaatgattttatcagggccgggatttgtccaatcctgcgagttaacgctgtaatgaaccactgaatagtggtactgctgtgcaatggtaagaacctttttattaaattgtccggtcggcgggcggagtaaatgaacattcttcacacccagctttttaaatgcagtctgggcccggaggatatctttttttatttcattgtcctctaggttggtataattcttatacgcatatcccatgctgccgatttgatgtccgtcttttatcatacgttcaactgtgtccgggtgccgttccgcccaagaagctgacagaaaaaaagtggcgtttttaataccgtttgcttttagcgcgttcagaatcggaaccgccttttcatcgccccagctgatatcgaatgttaatgcgacttcgcccgctttcgtctccccttttgaaatagccttcgggccgctatcagttaaaaatacaggaagggggactgctctctgtatataaaaaaagctggctgctgcaaatgcggcaatgataataataagcagctgttttattcttctgatgtgccacacgtagaagtgattcactgatgacgcctccttatcttgtccatgcttgattacatcgtatgccgcggcggagatgaatataacgaaatacgttttaaaaaaatgaaaaaaacacttgctaaattcatcgaatgcatggtatattattaaacgtcgctgatgaacagcagacaacaacaaaaagcttcggaaacaacttaaaaaaagttgttgacataaaagaagctgagtggtaagataataaagctgcttcaacaagcggtaatgatctttgaaaactaaacaagacaaaacgtacctgttaattcaaagttttaaataaatcgcacagcgatgtgcgtagtcagtcaaactaaggtctgcacgatgcagatcacacagacgttactgcaggatgcagtgaacttagtctgtgatccatttatcggagagtttgatcctggctcaggacgaacgctggcggcgtgcctaatacatgcaagtcgagcggacagatgggagcttgctccctgatgttagcggcggacgggtgagtaacacgtgggtaacctgcctgtaagactgggataactccgggaaaccggggctaataccggatggttgtctgaaccgcatggttcagacataaaaggtggcttcggctaccacttacagatggacccgcggcgcattagctagttggtgaggtaacggctcaccaaggcgacgatgcgtagccgacctgagagggtgatcggccacactgggactgagacacggcccagactcctacgggaggcagcagtagggaatcttccgcaatggacgaaagtctgacggagcaacgccgcgtgagtgatgaaggttttcggatcgtaaagctctgttgttagggaagaacaagtgccgttcaaatagggcggcaccttgacggtacctaaccagaaagccacggctaactacgtgccagcagccgcggtaatacgtaggtggcaagcgttgtccggaattattgggcgtaaagggctcgcaggcggtttcttaagtctgatgtgaaagcccccggctcaaccggggagggtcattggaaactggggaacttgagtgcagaagaggagagtggaattccacgtgtagcggtgaaatgcgtagagatgtggaggaacaccagtggcgaaggcgactctctggtctgtaactgacgctgaggagcgaaagcgtggggagcgaacaggattagataccctggtagtccacgccgtaaacgatgagtgctaagtgttagggggtttccgccccttagtgctgcagctaacgcattaagcactccgcctggggagtacggtcgcaagactgaaactcaaaggaattgacgggggcccgcacaagcggtggagcatgtggtttaattcgaagcaacgcgaagaaccttaccaggtcttgacatcctctgacaatcctagagataggacgtccccttcgggggcagagtgacaggtggtgcatggttgtcgtcagctcgtgtcgtgagatgttgggttaagtcccgcaacgagcgcaacccttgatcttagttgccagcattcagttgggcactctaaggtgactgccggtgacaaaccggaggaaggtggggatgacgtcaaatcatcatgccccttatgacctgggctacacacgtgctacaatggacagaacaaagggcagcgaaaccgcgaggttaagccaatcccacaaatctgttctcagttcggatcgcagtctgcaactcgactgcgtgaagctggaatcgctagtaatcgcggatcagcatgccgcggtgaatacgttcccgggccttgtacacaccgcccgtcacaccacgagagtttgtaacacccgaagtcggtgaggtaacctttatggagccagccgccgaaggtgggacagatgattggggtgaagtcgtaacaaggtagccg

SEQ ID NO: 8 - DNA, 56766 bp, Bacillus subtilis
ggtaagttccgacccgcacgaaaggcgcaacgatctgggcactgtctcaacgagagactcggtgaaattatagtacctgtgaagatgcaggttacccgcgacaggacggaaagaccccgtggagctttactgcagcctgatattgaatgttggtacagcttgtacaggataggtaggagccttggaaaccggagcgccagcttcggtggaggcatcggtgggatactaccctggctgtattgaccttctaacccgccgcccttatcgggcggggagacagtgtcaggtgggcagtttgactggggcggtcgcctcctaaaaggtaacggaggcgcccaaaggttccctcagaatggttggaaatcattcgcagagtgtaaaggcacaagggagcttgactgcgagacctacaagtcgagcagggacgaaagtcgggcttagtgatccggtggttccgcatggaagggccatcgctcaacggataaaagctaccccggggataacaggcttatctcccccaagagtccacatcgacggggaggtttggcacctcgatgtcggctcatcgcatcctggggctgtagtcggtcccaagggttgggctgttcgcccattaaagcggtacgcgagctgggttcagaacgtcgtgagacagttcggtccctatccgtcgcgggcgcaggaaatttgagaggagctgtccttagtacgagaggaccgggatggacgcaccgctggtgtaccagttgttctgccaagggcatcgctgggtagctatgtgcggacgggataagtgctgaaagcatctaagcatgaagcccccctcaagatgagatttcccattccgcaaggaagtaagatccctgaaagatgatcaggttgataggtctgaggtggaagtgtggcgacacatggagctgacagatactaatcgatcgaggacttaaccaatttgaatgtatgcttactgttatctagttttgagagaacactctcaatggtttggtggcgatagcgaagaggtcacacccgttcccatgccgaacacggaagttaagctcttcagcgccgatggtagtcggggggttccccctgtgagagtaggacgccgccaagcttttcttaacccagttcatgatgaactgggttttttatatgaaagatcacatagatatataaagctaatgcctttcaaaggcattagcttttttgtttacattgattttgctttgcttttgactttattgtctcgagcattcttaaactgaacacaatcagcagcataaggagcatcagtgcagtaaacagccagaacgcagtttgtgcgggatattcatctaagctccagccgacggcgatcggaaggagtgaacctcctaatccgtttgaagcgagcagaatactggtagttgtttctgtctttccgggataaaaatgatttgtgatgattagggctattgcaaacatgcctgccatgaacagccctaaaaagaagcaaagggcaaaaccgaaccatacgtttttgcttaatgctaatacagtaagtgcagccagaccgccaatacttatgagacggagataacggtgatatgtcagcttttctgataccgggcctgttaatgacctacctatgatcatccccgtccaatacactgtaactgttatcgttgccaaagagttggggatatcccatttctcagcgaaaatggaggggataaaatgtacaatggaaacttcactgccgccgtaaaagaagaagtaagcacccgccaaggcaataaacagcaatccgtgtgaccgataaccggtgctttcttttttagtgtcatcggaagagacctctttgcggatgagaagctgatcaatactgccgaaactcatctgcctccatgcgattaagagtgcaaaactggataaccctaatactaaaaaagcaattgtccacatgtggttgttgataagaaagcctgagagcagaggcatgaacagcgcacctaatccgtaggccacttccatcttgctcatggccacagcctgtctttctttaatagcggtgaggatgatcgtgcctacacaggattccaccaatccggcgccaagccctgcgatgctgacgagaagaaagagcagcggccagggcggcaggaaggtgatgaacatttcacagctgatgagtgccaggccaaagataacgacgtttttgcgcccaagctttttcaccatgtaaggcattccgatgacaccgatgagaaagcccatgaactgagagaatactaatacaccgccattactgtagctttgtgaataatgtgtgagtaactcaggcagtacggctcccagaataacaagtgtaaaagcaatcgatccataagaaaaacagcttatccacagcagacgagttttcatcattttatctccttatttcgtatttctctctactcgtatgacatgatgtttttacaaaaaatccaagtattgttactatatcacataactttttctcgtacatccattatggtaacgttaacaaattgttaacattttttacaagaaagatcgttgacattattttcaataatttatacgataaaaagcgaaattctaataatttcataggggtggtatttgtgggaacgaaggaaatcacgaatccagacagcttgtattacagtgttgacgatgtagtaatggagcgcggagaagggatttacctgtacgatcaagagggaaatgagtacattgattgcgcctctgccacgtttaacttgaatttaggatacggtaacaaagaggtcattgatacggttaaagaacaagccgataagctcatccatgtaacatcatcttttcaaacagacgccgtaaataagctggcagaaaaactagtagaaatcgcccccgataatctcacaaaagtacaccctaaagtcagcagcggttccggtgcaaatgaaggagctattaaaatggctcagtattactccggaaaaaccgatgtcatctccttatttcgaagccacctcggacaaacgtatatgacttccgctttgtccggcaactcattcagaaaagaacctttcccgccgcaaatttcttttggcctgcaagtccccgatccctattgcagccgctgtttttataatcagaaacctgattcatgcggtatgctgtgcgtagaaagaattaatgattttattgagtatgcgagcaatggaaaaattgccgccatgattattgaaccgatatccggaaacggtggaaacgtcgttccgcctaaagagtattttaaacagctgagaaagctttgtgatgaacatgatatcgctctgatttttgatgaaattcagaccgggttcggacggacgggtaaaatgtttgccgcggaccacttcgatgtgaaacctaatatgatgacggtagcaaaagggctcgggggcacaggctttcaagtcgccgccactctgacggaggacaagtataccgggcttccggggtatacgcactccttcacatacggctcaaatgtgatggccgccgctgccgcttgtaaaaccatagatatcatgcagcgtccgggatttttggaaaatgtaacgacggtcggtcattatattatggatcgcttagaaacgatgaaagaggatttcgcttttatttctgaggtaagaggcgtcggtcttatgatcggtgtggagattgtgaaagagaacaatgaaccggatgtggacctgaccaattatattgctaaacgggcaatggattacgggctgattctccggacatcccgttacggattcggaaatgtatttaaaatccgtccgcctttaaccataacacttagtgaagccgaagtgctctgctacagacttcgcaagctattggaggaaatcaagtgagagactatatcattgagcttggacaatttgtttatcaaaaggtgaaaaatcaaaaaggcacgctgaaaaaccggctcgtaaacggctattctccgggaggcgacgcccaatttaacatagacgccaatgctgaggaggcggtgctggattatattcaagaaaagggccatccggttgctttttacacggaggatggcggcctgaagctgattggagaagatccgcaatatattttaattgtagatccgatagacggaacgcgcccggccgccgcgggacttgaaatgtcgtgtatttcgattgcgcttgcttcgtataagccaaacgcaaagattaaggatatcgaatttgcttttttgcttgaattgaaatcaggcgcttatatgtacggtgatatatacagcgatgccattcattttgaagggtatcatggagaattgccgaatttgagcgaagtgcgggatattaaaaatatgttttggagccttgaatttaacgggcatccggcgcagctgatgacggacgcatacggccatctgattgaccagtcggccaataatggcggggtttttgttttcaacagcgcttcttattcgatttcacgaattattacggggcagatggatgcttatgtggatatcggcaatcgtctgctgaaagatgatccgaagctgctttcagattttcagcaggtcgggaacgggcaggtgctgcatttgtttccttatgatattgccgcaagcgtctttttggcgaagaaggcgggagtggtcattacggatgcgtacggccggtctttggacgaaacgcttctgacagatttaagttatcagaatcagcaatcatgtattgcggcttcaacgaaggagcttcatcaaacattgttagaccaaatccgctggggcagaaaggaagagaaatatgaaggcgttggtctggactcctaatgataagcttgaatatcaagaggtggacgagcctcaaattcggaaatccaatgatgtgaaagtgaaaattttcggtaccggtatctgcggaacggacttaaatgtgctgaaaggaaaaatgaatgcaacccatcatatgattatggggcatgaatcggtgggagcggtcgtggaaatcggaccggacgtgacaaatgtaaaagtcggagaccgcgtcgtgatagatcctacgcagttttgcgggaaatgtcattattgccggagagggctgacgtgttattgcgaaaccttcgaggattggcagctcggaatcggggcgcacggaacgtttgcggaatattacgtgggggaagacaggttcatgtacagaattccggattcaatggaatgggagcgggccacattggttgagcctctctcttgtgtgctgaatgttgtggacaaggcttcgattcagccggaggactcggtcttggttttggggtcgggaccgatcggactgcttgtgcaaatgatggtgaaaaaactggcgcgattgacggttgcgactgaaataggcagtttccgaagcgaggcggcaagccggatatctgattatgtctaccaccctgaagcattaaccgtggatgaagtgaaacggattaatcaaggaagaaaatttgatgtgatttttgacgcgatcggcaaccagcttgattgggcttatccttttattgaaaagggaggcagaatcgtgccgatgggctttgatgatacgtatgagatgacgatcaggccgtaccagctgctgtcaaacggcgtaacgattgtgggcacaggtgaagcccgccagatcatggaagccgcgttagcatgcgcgtccgaccttccgcagctctatgattttattacggaaaagacggaactgaagaattatgaagaagccattgatcatctcatgggcatcgacccggtgacaaaagaaagaaaggatatcagcgcaataaaaacgattcttgtgtctgatccggaacttttataaaagcggaaacggctccagtgagggccgttttcttttcttatttatacggcttgcacatttctttaaagtttaatatgatactctttgttaacaattcctttcctcaacgacattatactctgagcgtgtcctcttttccccgtaagcttgcctcatattccccagataaaatcaatgtttccaactgatagggtgcggatttttatagtgaaaaggagtcgttatcatttgaaagattatacgttacagcagcaatggttcgggaatgtccgtaaagacattctggccggtattctggttgctctcgctctgatccctgaggcgatcggattttcaattattgcaggtgtcgatccgatggtcggcctttatgcatcattttgtatcgcgattattatttctatcttcggcggcagaccgggaatgatttcagccgctacgggttcaatggcggttgtcatggtgacattggtggctgattacgggctgcagtatttgtttgcggcaaccattttgacaggtattattcaatttattcttggtgtcagtaagatagcgaaattgatgaaatttattccgcgttcggtcatgatcggatttgtgaatgctttggcgatcttgattttttctgcgcagctgccgcagttcaaaggagcttcatgggtcatgtatgccatgcttgccggatcactggctatcatatatctattgccgaaggttacgacggctgtgccgtctccgctggtggcgattattgtcatgacgatcattgcggtggtcttccatgcggatgtccgcacggtcggtgatatgggcgggatcacaagttcacttccgcatttcttgataccggatgttccgtggacgtttgagacattgcggattattttcccgtattctctggcgcttgctttcgtcggattactcgagtcattgctgacagcccagatcattgatgaaatgacggatacggatagtgataagaacaaagaaagccgcggacaaggcatcgccaatattgtgaacggatttttcggaggcatggccggatgcgccatgatcggccagtctgtcattaatacgaaagccggcggacgcggccgattatcggcttttaccgccggcgcgtttttaatgtttttaattgccgtattaagcggtatcgtcgtgaaaattccgatggctgcgctggtggccgtgatggttatggtgtctatcggcacgttcgactggtcatcgattaaaggtttgcggaaagcgccccttactgattcgatcgttatggttattaccgtcgtgacggtcgtcctgacaaatgatttatcaaagggtgtcttcgcgggtgtgatattaagcgcgatcttttttacggcgaaaatttctaagctgaagattgtgtcacattccgaacagaaagatgtcagaacttataaggtaacgggacagatcttttttgcttccgtgtctgagctcatgaatgccatcgtttatgatgaagacgtgaaacggattgtcattgatttgaccgacgcccacgtgtgggatgattcgggagcggcggctcttgagaaaattgtcgccaaatgtaaagaatacggaattgaggctgaattaaagggattaaatcagaaaagccgagatttaatgaaacaaatggcatagaatttgtgaagtccggatgaatatatccgggctttttttcggttaaatttgccggggggcattgttataatgaatgagacttgaaaaccgtatataggagacttgcatatgatgtggcttcagaagttgaaccaagtgttggggagaatcatgccgcttttgactccgtcaagtgtggcggcgggtgtgctgttatctcagcatatcagctggatggccggcgctgtgccgtggatatttgcatttattacatttacgggcagtctgagtgccaattttcattcgctgaagcgcagtatcgagaagccgctcccgatgatcatggcattgtttgttctgcatattttcatgcctgtttttgcatggggaagcggccatctgattttcagcggtgaccctttaactgtgacggggctgattatgggtgtggtgattccgaccggaattacgagtttgatttgggctgcgatgtataaggggaatgtcggattgacgctgtctattatcctggttgataccgtgctttctccttttatcgtaccgttaagcctgtctgtcctggccggggcgaatgttcagatggatgtgtggggaatgatgaaagggctggcggagatggtggtgattccatccatcgcagggatgatagtcaaccagttttccccgccggtaaggactcaggcaataagccggtcgctgtctcctttttcaaaaatctgtctgatgattgtcattgccattaacagttcggaaatcgcgccgtatgtcacgcacgtggatatcaaatttgcgggcatcgctggcatggtattttttattgccatgacgggttatgccgtggcatggctgatcggaaggctgatgaagcggagccaggatgaaattgtgtctctgatttatacggggggcatgcgcaatatcagcgccggagccgttctcgccgtttctttttttccgtctcaagtggcggttccggtcgtcatcgggatgctttttcagcaaatccttgccgctttgttcggctatttgctgagacgctttgaacttaagccggtcgtgatgaagtatgaaaaaaaccgctcagctacgtgagcggttttttccgtacagccagcttagtgctgcattgaattgtcgtttgaatgcttcttgatggtgcacggcgccctcttcgatcgtgaaagagagctgagattgagaaaagcctttttgcttgaggctttcgtacacgtctttatttagtcggatcatgttgttttggatgttgtttttatgctcagcttcgcggctgccgacagacataaagatacgccgccgtgccggacgcaaagatgcggagcggacataatctgctgatttttcataccagaaggaaccggaaatacaaccgattctgccgaatgtttcaggcttttggagcatcgcgtatatcgaaaacagtccgcctaatgacgcgccgatcagtcctctcgtttccggatgtgcagaaatgtgatgcatatcttcaacagtgggaatgatgacatttgtcagctcctcgagaaagagcctccctttgccgccgaaatcatgaaacgcagggctcagggagggcgcgggccacggcgtgtactcatcgagcctgtcagccggtttgatgccgatgaaaatcaattcgggaagtgttccgttcgcaaattgggattcaagcttatccatctgttctaaaaacaaaaaacccccgtccagtacgtacacacagggtaaagcccctgtttgaaccgaataggagggaggaagatacacagtgcattcctttccgtttatccggtgttctgtaagggtgcctctcatgcatccagccccttcttttgcttaaacagaagaaaaaagaaataaggaacgccgagaatcgcaagaataattcccgccggcacttctgaaggctgaaagaacaatttgcccgcaaagtcggcggatatgacgaggagcataccgaccaatccgctgaccggtaatgagtatctgtgctcaatcccggcgagcctgcgggaaatatggggcgcgatcagtccgacaaatgccatgctgcccgctgcggttacacatgcgctgatcaaagcgatgcaggcaatgagtaaaatcgttttttctttattggttgaaacaccgaggcttttcaccgtgtcctcatcgaaacgaatggtatccagcaatgacgttttcgccataagcagaggaatgaacacgatcagccacggaaggatcgccgtaatggtcaaccagtttgccgaccagatgctgccgtttttccaaaccatcgccatctcataatcctgcgggtccatttttaatgaaagaaataaagacagcgcgctgaatccggaattcatggcgatcccgacgagaataattctgcccgattccagatgcccccggtgccaggcgaaaatatagatcagcacggccgccatcaatcctccgatgaggccgaagacaggcatacccatcgcagaggcaagtgccgtcgcttcagattgtccctgaaacagaagcataaacgtgacgattccggctccggctcctgcattaatgcccaaaataccgggatcggcaagaccgtttttggtaatggcctgaataacggctccggctatccccaacccgagtccgatggcagcagccatgacaatgcgcggcagcctcagctgaaacagcaaaatgtcatattgcggattcggatggatgcggaaaagcgtactgagcagttcacccggctttgcggaaaaagaaccgcttgtcatgctgaaatagcttacgagcaatatgagagcaatcagaatgatataaattccggccattttacgtaccacgctgatcccctccttttcttttaatcaaataaagaaagaaaggaacaccgatgatagaagtgacaacttcaataggcgtctcaaacggataattgatgaatcggctggcaagatcgcaaagggtcaggaagacgccgccgatgatgcacgcgcatgggatcagcctgctgtagtccgatccgacgagaaaacgtgtaatgtgcggaacgaccaaaccgacaaatgcaatttttccggcgagtgccaccgagcttccggtcaatatgacaacggccgtcatcgccatgagtttgatggttcttttctgctgtcccagactttttgaaatgtcgtctcctaatgatacggcagtgacctttttgctgagaatcatggccgtgatgattccgatcgcaaaaaacgggacggccagtttcaaaaaatcagggttcatttgatgcagtctcgcactgtaccaaaaactgagatcctgcgaaatttgaaaataaatcgaaagcgcagccgacagactgctgagaagcatacttgtcaccgttccgatgatggcaagctgcaccggggtaaaaccgccgggaagaatggaggccagcccgaaaacaagagcagcgccgaatgcggaaccgataaacgagtatatgatcatttcaatggatgtcgattgagggagcaataccatgcaaagggtgatgataaaagcggagccgtccgacacacccatgattgaaggcgaggccagatagttccgtgtgattccctgcatgagcgctccggaaacagcaagggctgcgccgataaacatagcgccggcagccctcgggattcttgaatgccatatgatctgatggtcggtattctccggattaaagtgcagcaatgcggagaacacggtatggatgtcaagctgctttgcgccgtataaaacggaaagcagcagtgacagaacaatggcaatcggtgaagcaatgataatcatgtgtgtccgccgttttgcatacatgtgaaaaacctactctttattagtcttgagtcaatttgtcagccgcaacctgtaagaagctgattttactccacgcggttccgccttgggctaacggatcaatcgtattgacgtatacatggtcttttttgactgccttcaggctcttccagatcggatttttctctaagtctttcaaagcgtccggcttatctgcgttttcgtcatcagagaattgtacgaagatatggtcagggttcatttcgcttaatttttcaagagaaatcagttcctgcgctttcgccgctttgacttcgtccggcgccttcaggcctaaatcaccgtaaagcgtggagttgaaatatacttgttcaggataaatataaatattgccttgtctgattctgatgaccagcgcgtttgactgtttcgctttgctgttgatctttgtttttgtctttttcaggtcctgttcgtaatctgcgatgatttttttcgcttttttctctttatctgtaagctgggcgagcagcatcatgttttctttccagtttgatgagatatgagagacagggatcgtttcagcggtgccgctcaattttttcaacgttttttccgggaatttggttgatgccagaatgacgtccggctgcagctcaagaattttttccatattcggctgcattttttcccccgttgatacggatttatctgtaatatctttaaacagttccgggaatttgcccgagaaagaaattgctcctgccggatgaacgtcaagcaatttggcgtcttccattgattctacgctgcctgtaatggcgattttgtcagtcggcgctttgacttcatatgtttttccgagatattcgattttctttttatctgaagaagcgtcctttcctttacttgctgtatcagatgtttctgagcttccgcaagccgcggccgtgaaagccaaaagcaaaatcatgaaagcgaatgccaatttcttcatctattgttcctcctgttcaattgataactattatcaattggaattatagagaatgaacagggataagaccatggataatttccggcattaccatggacgatcttcggaaaaaatagaaatgctttgctcgatcatccgctgatgtccgcttggagaatattcaatccacgggtcagatgatataggaaacacgcgtttattgctgacggctctaaggttctgccatatcccggtctgctgaatccgctgaaaataacgaagcgtttccggttctttacaagtgaaaagcatgatgcagtcagcctggcaatccgccagcatgtccaaggaaatcttttcgtcaggagcaaaagattccggttttgcggaggcaaagcctaaatcaccgaagaagacatcctcaatactgttgttatgggcgatgtacatattttctttatatacacggacaaataagaaccgctgatgccgcacgtgtttcagagcatctttcgctgaatgggcgagactttgataagctttaagccagtgccgcgcttcctgctcttcattcaaatatgcggctgtgcgaagaaactggtctctccaattttcttgagccggaaggtaaaaaacgtcagtgatgtcattcaggcgctgtttttcttcttcactgacagaatcaagactgaaaatgatgtccggggcagcttgggaaagcgtgtgcaggttctcttcccaatttgcattatagcggtaagcactcaggtgaaccggaatatcggaagagaattgtttgtaataataggccgtccatttcgggtgcagcgccgcagcataaggcacgtgatgcagaggaatcagatgccccatcgtttcttttccgtacgcggccatttttgtgcgcctttttttcatatagcttgtgggtgagctgccggtatgttttttaaagatgcggctgaaataaaattcatcttggtagccgatttgatgagcgatttcccgcagtttgcagtttgccttggccatcagttttttcgcattggttatgcggatgtctgtgatatattcagttacgctctgcccgtatagttttttaaaggtttcactgtaatgcttgggactgattcccgccatatgagcgagctgggtgagcgtgatttttgtgtcggactgagcatgaatgaattgttttgtctgttcgatcgccgctttcgtattattttgatggcatacttttgcggcataaaggtcgtacatcagctgctgaaagtcggctgtatatttcattttctgcaatctatccgccgatcgcgcattttcagaaagtgactgaagccggcttgtcaaatgatcaaccgtttgtaaattcatttgctgaagtccgtggaagatgtcttccccgttatccggaagcatcgcttcatcatctgatgaataggagaaaacacggagtctgacgatatacaaatggacgccgcctgacggtataggggcaatattgaatgtctcatcacaaggacagatgtagagcgtttccttctgcagcggaaagctgtctgttccgatatcaatttgtccctcgcctttcacatgaaagatcaatacgggggaatcagtgagctgatgctctgacagaaggtcggctgttttttttacggagatgatatcaatgggctgaaagaataatgtgtttttcatgagaaaccaccttttaggaaacattcatttaaatgataactgttatcatttaaattgtaccaaataaatgaatgttttcctataaaaagcggaaatgtgaaatgcgtcaaaatgttacacgtgtaacacgaatgttgtcagtatatgaggtattgttttcttagagttttgaattggtccagccggcgttgatatgtgccggtgatgtcttcaatggaagtgcctttttctatttttttgcgtacccagccgttaccgatcaacttgtcaaaagagcctgtcggcaagaatgaaaagtcattcggatataagtcatgcatggttttcagaatggaaagccctgtttttgccgcttcaaatgtgtttctgtttgttacgtagacttgtacgccgtggcacagcttgccctggtgcttggagaagctggggataaatgatgcggctctgaaggtgacgcccggaagcttgagactgttcaggcgttcttcgagctcggtgcttttcatataaggcgcgccgatcagttcaaacggctttgtcgtgccccttccttcggatacgtttgtgccttcgattagtcctgtcgccgaatatgcgaatatgctgtccggagtcgggatattaggcgaagggaggacgaacggcagaccggtatcttcaatcgtcatcgtccgcttccagcgcttcatttttacgacggttaggtcggcgccaatatgaaactctttattgaataaaagagcaagttcaccgatcgtcatgccgtgcttcagcgggatcggatacagtccgacaaatgaagcgtaatccggttcaagaaccgggccgtccggatttcgtccgccttgcggattcggccggtccaagacataaaaaggtatgcctttttcttttgccgcttccatggcataggccattgtataaatgtaggtgtagtatcgcgttccgacatcctgaatatcgaaaatcagtacatctgtatctttcagcatgtcaggcgtcggtttcctcgtttccccgtataggctgtagacgggaagccctgttttttcgtctatataggatgtgactttgtctccggcctgagcatcgccgcggacaccgtgctccggtccgaataatgccgtcaagtggatgtctggcgcctcatacagcacgtcaacgctgcttttcaatgacgcgttcacaccggtcgggttggtgatcagcccgaccctttttcccttcagttcctgtttataatctttcagcaggcggtcgatccctgtttggatgcttggtttcttggcggtatgaaggtttctgtcagaagccgccgagactgccgtcatagcactgatgacgacaagtccggcgagaagtgcagccgtatgtgttttcataatcagccctcctgtttaaagcggttttccggtcttcagattgataccgaaaccataaggatacagtgtcgttcccggatgcgtgacggaaggaatgtcagcgggcagcctgccttgcggtgttgtctgtccgaatatcgcttcaacgcctgccggaatgtttggctggagaaattgtccgtctgtatatcctttaaagccgtagactgcgataagggcttcagcttcttcaaagttcgcggcgtcatatggattacgcaggctcatcagcacaaagggtttttggttcgattgtgcggctttcatgacggcccgcggaaatgcagtcgtccacttgccgggatctgtgacggaatcgtcaatcacgccgtcgtttacgacaggatcatttttcacaacatatgagcctgtaatcacgtaatcagcgtcagatatctgctttttgtgttcatcatgaaatgtacgctcggcgaagttcattttactgatggttaccggccggatttttttctttttgatgagctgccgaatggtttgttccattgacgctgtttgatcttcatatggagcggcaatgagaacgcggctgttctttttcggtttgaatgggagggtgcggtttttgttttgtaagacggtgacggacctttccgcgatttgtttttcagctttcaggtgatttttgctgccgacggttttctttgcttttgcaatcttctttttcagatttgtctctttcggtgcgggatatatccctctttttattttcagggaaatgatgcgttccgccgatttgttaatttgctgcagcggaattttccctttttgtaccgccttttttaaagcggaatgaacccgggcaaagcggttttccgtttgcagcgatgtcacttgggccggcatcagggcaatatcgactcctgcttttacggccatgacgaccgcctcttcctggccgaaatgatcggcaatggctttcatatttaatgcatccgtaacgatgacgccgttaaatcccatttctctacggagaagatgagtcatcacttttttcgagagtgtggcgggtacgaggatgtctgaaccgtccagcttgcttttataggttgtatcgtcaaacgcgggaaattgcacatgggctgtcatgatcatatcagctccggcctgaatggccttccggaacggataaagttcaatctgacgcagcctttcttgattgtgggtgacaagcggaaggccgtagtggctgtcgacatccgtgtcgccgtgtcccgggaaatgtttgacggcggcagcgacatcctgcttttgctgagccttcattgaggcaagaccgagtgaagctgtcagatctcggtctgaactgaacgacctgacgccgatgacagggtttccgggattattattgatatcgagaacgggagcgaagttcgtattaatgcccagtgctttcagttctttcccgataatggcgccggtctgggacgcgtaggctgtttttctagcggctccgagcgccatattgcctgggaaatgagtgccctcaccaagtctagttacgatgccgccctcctgatcaatgcttaataatagcggaatgtcagggctcgccttttgaaaggcatctgtcaggcgtaccgtttgctcagtgttttttacattttctgcaaataagataacgccgccgaaccggtacttttgaataagccctgcgacttctttattcatttgggtaagagcctcaggtgatgactgcccctttttttgccaattgcgaaaatcaggcatgagcatctgccctaatttttcatctaatgtcatacgggataccgcttgttccgcctgtgacggaatgtccggttttgtcgatacatgatgcgtgccgaaaacaatgaacaacagtaatacagctgagatgacaagtttcatgatggtgccctcctgccgtcatagtttggacaaaagacatgggttgtcattcaatggcttcataaatcgtttttatgacgctgccgtagcttccggtcggaaaaagatccccttcaaaaacattcgggttttcaccgggactgacgacgggggaatgctttttattggttaaaagtgcgatccccagcttataagcgggatcaataatcgtgacggtgccggtccatcccgtatggccatatgcctgcctgcttgcataagggccgaacatccactccatatccgggctgccgtttttccgccagccgagagcgaaagtcggatcagaggatgccgccgttgtgaacaaatcggccgttcttttattgaagagagaaacgtgtttataactgcctccgttcagcatgacttgaagaaggacggccatatcatcagctctggaaaacagcccggcgtgaccggacaccccccccattgagtaaaatgctttttcatcgtgaacttccccctgcagcgtatacgtcctgatgtgaggaaaatggatgactccgtcacgtgtgttgcctaaacgttcagtagctgcgaatgctttttctttaaagcctttttgcagcggattgaacagtgtgtgcgtcagtttcagcggtttgtacagttcttgttccgcataggcatcaagggtttttccggttatgttttcaatgatgcagccgagaagcatgtaaccgatatcgctgtatacgtgttttgttcctggtttgtatgcaagcgggatttgagtgagaaaacggatcgttttatcccgttcttgtgaatacaaagggcctgcggtgtccggctgatagaaataaaagcttgccggcagaccggattgatgctggagcacatcgatgacgcgaatgcggtctttttcttgaatcggatcgctttttctgtctttgaaatcaggaaggtaagccgcgactttttgatacacatcaagctttccctggctgacgagtcgctgtaatgcaaaattcgccgcgtacatttttgtattggaagctagatcaaacatggttgatgttttcatttttttcggacgggataaaagggtgttcccgtcatattttttgctgtagccgtatgctttctttttgatcacccgtccgtcctttacgacgacgaggacggctccggggaatcctgctgcgatgtctttttcaatcatttgatcaacctttctgagctttgctgcgtcgtataatttggattgggcttcggctttgtgctgcggcagaaaagagaggctgatgaccattgtgagtatggcggctgtcagtgttttcatattctgatccctcccggtttattcaaattcagctgccatgtcatccttaaatccgaacgcataagtgaagacaaagcccgccgcgtaagagatgaagagaccgatgatatacaaaacgatttgagccggctgtacgagaaacgagagcggaaggccggagacaccgattgaaaaagtagccacctgaaaatgggcttgaaaggcgccgccgattcccgcccctaaacacgccgtcaaaaacggccggccgagagggagcgtgacgccgaagatgagcggctctccaattccgagcagaccggatggaagtcctccgccgatcgctcttttcaatgaggctttttttgttttcataaagatggcgaaggccgcccctacttgacccgcgcctcccatcgcgagaatcggaagaagcgggtcatctccgattgatcggattaattccaaatgtacgggagtcaagccctgatgcaggccggtgacgacaagcggcaggaaggcggctcccagtacaaaccctgagagcactcccccgacattcagcagcgacaataaacctgatgtaatcagatcagaaataaaaccgcctgcagggataaaaacgacatatgtcaccagcccggtgataagtaaagacaatgtaggcgtgacgataatgtcgatggattgatggacgtactttctgataaaccgttcggtataagcgataaaaaccgcagcgaaaagaacgccgattaatcctcccctgccagggagcagattctctccgaacaaactgatattggcgatctcagggttaaggatcaatatgcccgcaaggccgcccatcgcaggtgtcccgccgaattccttcgccgcattgatgccgacaaggacgccgaggtaagcgaataagcctgaaccgataaccgttaaaataagtgcgatttgggattctttcgggagccagccggcctgaatgacggctttcgtaataccggtgattaaacctgatgcaatgagtgcgggaataaggggaatgaagatgcttgatatttttctcagaaacagtgtgatgggtgtggtgttttttctgttgagatcggcttttttccgtgaggcggcttcttttaaatcaatgttttttccggatgacataagttttgcgaaagcgtcagcgacatgattgacgacacccgtgccgagaatgatctgcagtgtttcggcttcgacgacgcctattaccccgtcaagccgtttcagcgcttcaatatccgttttgtcctgatctaaaggtgtaatcctcaggcgtgtcatacagtgggtaaagcctgaaatattcgatgaaccgccgcaattgtccaggatatctttggccagtgactgataaaatgcctctttgctcatggagatcctcctttgtccgtacgatttttcccggagagctgtgcctgaaacgcgtcctaaaagcgcctgcgccgatcatgaaaacggcgcgggctcgtaaaagcacattattcttcaccaaagaacgatcagcgttctttttcttttgaaacgtgctgttcaatggctttgtcaatgaagccctctgcttctttgagcagtgccttcgcgtgtgtttcgtctgaattcgtcttcagcatgacgattgccgttttgacatggctgcctgcggcctcaagcgtttcttttgccttgtcgtacggaacgcccgtgatgctttggataatgccgattgcgcgttctttcaatttttcgttgctgacatgaacgtctaccattaaattttcgtacactttgccgcttttgatcatcacggccgtggaaatcatgttcagaatcattttatgtgccgtcgccgctttcattcgtgttgaccctgtaatcacttcggggccgacgacgacttcaatgctgtgatcggcataagtgctgatcaatgagtgtttattgcatgtgagcgcgacggttttggcgccgattgtttttgcgtatttcagcgcaccggccgcatacggcgtgcgcccgcttgccgcgatggcgattacggtgtcttctgcggtaagcccgatcgttttgagatcgagagcgccggtttcctcgctgtcttctataccttcagccgcttgcaaaaaggcgtctgctcctccggccatcagaccgatgacggtgtcgggacttacgctgtatgtaggcgggcattcaaccgcatccagtacaccgagtctgccgcttgtgcccgctcccgcataaatcagcctgccgtttcgccgtaatgattgatgggcgaattgaacggcaatctgaatatcgggcagcacctgctgaacggcttcagccactttgaaatcctcttcgttaatgatgcggagaatttccatcgtgtctgcttgatggattgaagcggtctgcggatttctggtttctgtggtcaatctgtgaatgttaagccggtctgtcatgattgtaccctcccaagtcgttaatacttgaagtatatgggcttctgaatagatgtttcaagaaaaatcggcaggggtgagatgaataatcaagcgctttcacaaaaaatgatgcagaatgtgctgttcaccgatggggccgatcctgcgacgacctttatcaataaaaccggaagaccggtacaggttctttgcacgatgattgcgatggtttacagcaagcacgatttcatcacaccaaggaaagtaatttgcgacaaaagcggggagctgcagcatcgcttgtttggcataaccttttccctgatgcggcgcatgtaaggacagcgcactcagcaaaatggcagacacattgttcgaatacggggcaatggtttcttttgaggtatgtaaaataaagaaaccgacggggcggtcttcatttaaaatgactgtcgggtagcgatcccggatgacaagagcctgcggcagtacatccttcggcagagctgtgaactttttatcttcttcactcagcacaaacccgttcagtccgtctgcatgctccggtttataaaaggacagggctacatccatgatatctactctccttttttaaaattgatacaattcatcttctgatagaacacggcagcctgcccgttttaaaagagcggaagtgatgccgtctccgattattttttttcctgagaaagtgccgtcatagataaagctgctgccgcaggacggactgttttctttaaggatgaccgttgcggcgcctatttcttttgcgtatgctaatgttttttccgcgccgtccatatataaagccgtaacgtcttcgcctgatgccgttacgattcttgctgttccgttcagcacgtcttcgcccgtgccgccgatgatttccgccggttcgcggggagtggtgaagccgcccaaaagttcggggcagaccataacagctttcttttcttctacgagtctgcggattttttccgaagcggcgtgagagccgttatacctgcattcgataccgccgagacaagagctgactaagatcatctgtgtccattcccttcaatattttgatactttcatcataaatgaaataagagaggagggatgagtttttcagttaaaaaacgggtaaaaaagtttgaaaataaaaaaaataattttcctctttacaaatggggtacaacctgtatataataacttttgtcagctcgacgcggacacaacggcccgttggtcaagcggttaagacaccgccctttcacggcggtaacacgggttcgaatcccgtacgggtcatatggaggattagctcagctgggagagcatctgccttacaagcagagggtcggcggttcgagcccgtcatcctccaccatatttgccggcctagctcaattggtagagcaactgacttgtaatcagtaggttgggggttcaagtcctctggccggcactgtttttcaaaaaaatacggaggggtagcgaagtggctaaacgcggcggactgtaaatccgctccctcagggttcggcagttcgaatctgcccccctccaccatttttgggctatagccaagcggtaaggcaacggactttgactccgtcatgcgttggttcgaatccagctagcccagtctcagacaccttttgcataaaggtgtcttttttttatcagcattttgtttcgatttctgattgttcatcagatatactatttttaagctgctgttaaggcagtatattctgtattttccatctacaccctgcctgaaatttggtaaaataaatgtaataaaaaaatgaaaccttttaaaacaatcaacgtatagatacagaccggtgaagggcagaggtaagataaaacatggaaaacctgattaaaaaaagaatcaagcaagtcaaaaaaggcgatcaaaatgcgtttgcagaaatcgttgacctttataaagataagatttaccagctttgctaccgcatgctcggcaatgttcacgaagcggaagatattgcgcaggaagcttttatcagagcgtatgtcaatatcgacagtttcgatatcaacagaaagttttcaacgtggctttacagaattgcgaccaacctgaccattgaccgcatccgcaagaaaaagcctgattactatctggacgcagaagtagcgggagcagaagggctgacgatgtattcgcagatcgccgcggacggggttctccctgaagacgccgtattgtcattggagctgtcggacacaattcagaaaaagattttaaagctgcctgacaagtacagaacggttattgtattaaagtatattgacgaactctctttaattgaaatcggggagattctgaatatccctgtcggtaccgtcaagacaaggatacacagaggcagagaggctcttagaaaacaattgagggatctttaagtggggtgatgaaatgagctgtcctgaacagatcgtgcagcttatgcataagcatcttgatggagatatccttcctgaagatgaaaacgtattaaaacaacatttgcagtcatgcgggaattgcaaacggcattttcatgaaatggagaaatccgtagcactcgtccgaagcacatcgcatgtcacggcccctgctgattttactgccaaagttatggcgaatcttccaaaagagaaaaaacgcgcttctgtaaaacgatggatcaaaactcatccgatgattgcagccgcagcagtttttgtgattttaatgggcggcggttttttcaacagctggcataatgaccacaatttcagtgtgtccaaacagccgaaccttgtcgtgcagaatcacacggtcaccgtccctgaaggcgagaccgtaaagggcgatgtcacagtaaaaaacggcaagctgttcattgaaggaaaagtcgacggcaatgtgaccgtcgtcaacggagaaaaatacatggcctcagccggacaagtcaccgggcagattgaagagattaaccaattgtttgactgggtctggtacgaactgaaatcggcgggccagggcgtcgtgagcgctttggacccgagtgaagatgagtaaagcgtataatcgctttactctttttttgtgcatcgccgcgctggctcatttcacttgagaaatcaaaatgtggtataatgagcacgctatatgatgtacatattgctcatgcagcacaattcataacagaaaaacgaaatgactgaattcttggaggacgaggaaatggcttttgaggacatcccatttttgcaatacctcggcaatgccgttgatattctccttgtttggtatgtgatatataaattaatcatggtcatacgcgggacgaaggcggttcagcttttaaaaggaatcgtcgtcatcgtattggtccggatggccagttcatatttgggactcagcacgcttcagtggctgatggaccaagcgataacatggggatttttagcgatcatcattatattccagcctgagctgagacgggcgcttgaacagctcggacggggccggttcttttccaggagcggaacccccgtggaggaagcgcagcataagacaattgaagcgattacaaaatcgatcagctacatggcgaaacgccgcatcggcgcactcatcgcgattgagcgcgatacgggaatgggcgattatattgagacgggcatcccgcttaatgcgcaggtcagctcggagcttttgattaatatcttcatcccgaatacaccgctgcatgatggagcggtcattatgaaaaataacgagattgcggcggctgcctgttatctgccgctttctgaaagcccgtttatttcaaaggagctggggacgcgtcacagagcggctgtcggcatcagtgaagtgacggacagcttaaccattattgtatctgaagagacgggcgccatcagtgtggccaaaaacggagaccttcacagagaattgacggaagaagcactgaaagaaatgcttgaagccgagtttaagaaaaacgccagagatacttcttctaaccgctggtactggaggggcaagaaaaatggataaattcttaaacaaccgctgggctgtaaagatcattgcattgctctttgcgctgctgctttacgttgcggttaacaacaaccaggcgccgactccgaaaaagccgggggaatccttttttccgacatcaacgactgacgaggctacgcttactgatattcctgtaaaagcatactatgatgaagcgaactatgtcgtcaccggcgtgccccagaccgtaaatgtcacgattaaaggctcgacaagcgcggtgaaaaaggcgagacagacgaagaattttgagatatacgccgatatgaataagctgaagaccgggactcataaggtcgaattgaaggcgaaaaacgtatcggacggactgacgatctccattaacccgtcagtcacgacggttacgattcaggaaaaaacggctgagagttttcccgtggaagttgaatactacaataaaagcaaaatgaaaaagggatatacccctcagcagccgattatcagcccgaaaaatgtgcagattacaggttcgaaaaatgtgattgataacatttcacttgtcaaagcatccgtgaaccttgaaaatgcaaatgagaccattgaaaaggaagtgaaggtgaccgtctatgacaaagacggcaacgcacttcctgttgatgttgaaccgtcagtcattaaagtgacggttcccgtagccagtccgagcaaaaagcttcctttcaaaatcgaaaggaagggaagtcttccggacggggtgagcgttgcgagcattgactcgaatccgagtgaggtgacggtttacggcccgcaggatgtgctggattcactggaatttattgacggtgtatctcttgatttaggcaaaattgataaagataccgatatcaatgccgatatcccgcttcctaagggtgtcactaaggtatcaccggaaaaaatcacgcttcatattaaagtggacagtgaagacaaaaaggattttgacaatgtcggaatcaagacggtcggactgggaggctcacagcagattgagtttctcgatcctgaatcgcaggcgataaatattacagccaaaggctctcccgccaacattaaggcgctgaaaaagtcggacattgaactgtatgccaatgtctcggacttggatgacggagagcactctgtaaagcttgaagtaaacggcccgcaaaacgtcacatggtccctgtcaaaagacacggttaagatcaagctgacttctaagaaaaactcaagttcaaataaaaataacggcggttccgctgattccggcaataagaacggcacaagcggagacgcagacaaagacaagaacaagaaccgggaagacgacactgacagcgatcagaataaaagtcaaaaccaggatcaaaatcaagaccaggatgaagacggatcaagcgctgattcttcttcaacagaatgaaaaaggagcgatacaaaatgggcaagtattttggaacagatggtgtaagaggtgttgccaacagcgagcttacgccagagctggcctttaaagttgggcgttttggcggttatgtcctgaccaaagataagcagcgcccgaaagtgctgatcggccgtgatacacgtatctccggacatatgctggagggagcccttgtcgccggacttttatcgatcggagctgaagtgatgcgcctcggcgttatttctacgccgggggtatcctatttaacgaaagccatggatgctgaggcgggcgtcatgatctccgcttctcacaaccccgtacaggataacggaattaaatttttcggaggggacggctttaagctttctgatgagcaggaggccgagattgaacgtctcatggatgaaccggaagataagctgccgagaccgacaggcgcggacctcgggcttgtaaacgattattttgaaggcgttcaaaagtatctgcaatttttaaagcagacggcggacgaagatttcacaggcattcatgtagcgcttgactgcgcccatggtgcgacatcatccattgcgacgcacctttttgccgatctcgatgctgacgtatctacaatggggacgtctccgaacggattaaacattaatgatggcgtcgggtctacacacccggaagcgctgagtgctttcgtcaaagaaaaaaacgccgatatcggccttgcgtttgacggagacggcgaccgcctcattgctgttgatgaaaaaggaaacatcgtcgacggtgatcagattatgtacatatgcgcgaagtatttgaaatcagagggccgtctgaaggatgataccgtcgtatcgactgtgatgagcaacctcggtttttacaaagcgcttgaaaaagaagaaatcaaaagcgttcaaacggcagtcggcgaccgctatgtcgtagaagcgatgaaaaaagacggctataatgtcggcggcgagcagtcagggcaccttattttccttgattacaacactaccggcgacggtcttttgtccgcgatcatgcttgtgaatacgctgaaggcgtccggcaaaaccctttcagaacttgcggatgaaatgaaaaaattcccgcagctcttagtgaacgtgaaagtgacggataaatataaggtagaagaaaacgctaaggtgaaggccgttatttctgaagtggaaaaagaaatgaacggagacggccggattttagtgcgcccgtcaggcaccgaaccgctcgtccgcgtgatggccgaagcgagaacaaaagagctttgtgacgaatatgtcacaaaaatcgtggatgtcgtgcggacagaaatgggagcggagtagcgaagtttataagcagagagcgaacaagacaagtgcgatcagcataatatgatagtaaacatgatgccggggcggcaaaaaataattgaccgtccttggcacatgctgtaaaatcaagcttgttcagcctttgtttttcacttgcaggaaaggcgggattgtttgcatcttttataattacagcgcccgaactaagcgcccgaaaaacggcttagttgacgaggatggaggttatcgaattttcggcggatgcctcccggctgattcatttagatcacagccgtaaggatttcttcaaaccggaggggcgactctccgaacaaagagaaatcacatgatcttccaaaaaaacatgtgggaggggacgattgaaagtccccttgtaatttgactttcttcgtctccttttgcacctttaggaggaagaaaatatgtgtggaattgtaggttacatcggtcagcttgatgcgaaagagattttgttaaaaggattagagaagcttgagtaccgcggttatgactctgccggtatcgctgtggcgaatgagcagggcgtgcatgtgtacaaagaaaaaggccgcatcgccgaccttcgtgaagtggtggatcactcggttgaatctcaagcgggaatcggccatacacgctgggcgactcacggcgaaccaagcttcctgaacgctcacccgcatcaaagcgcactcggccgctttacacttgttcacaacggtgtgatcgagaactatgttcagctgaagcgcgaatatcttgaaaacgttgaactgaaaagcgacacggacactgaagtagtcgttcaaatgatcgaacaatttgtggcgggaggacttagcacagaagaagcgttccgcaaaacactgactctgttaaaaggctcttacgcaattgcattatttgacggtgaaaacacagacaccatttacgttgcaaaaaacaaaagccctctgttaatcggccttggagatacgtttaacgtcgtggcgtctgacgcgatggctatgcttcaagtaacgaatgaatacgttgagcttttggacaaagaaatggtgatcgtgacaaaagacgaagccgtgattaaaaaccttgacggtgaagtcatgacacgtgcgtcttatatcgctgagcttgacgccagtgatatcgaaaaaggcacataccctcactacatgttaaaagaaacggatgagcagccgcttgttatgcgcaaaatcatccaaacgtatcaagacgaaaacggcagactggccgtggctggcgatgtcgctgacgccgtggcggaagcggaccgtatttatatcgtggcttgcggaacgagctaccatgccggtcttgtcgggaaacaatatattgaaatgtgggcaaacgtcccggttgaagtgcatgtagcgagtgaattctcctacaacatgccgcttctgtctaagaagccgctctttatcttcctttctcaaagcggagaaacagcggacagccgcgccgtgcttgttcaagtcaaagcgctgggtcacaaagcgctgacgatcacaaacgttccgggatccacgctttcccgtgaagcggattacacattgcttctgcacgcaggccctgagatcgcggttgcatcaacaaaagcgtatacggctcagattgccgtgcttgcgatccttgcgtccgttgcagcagaacgtaacggcgttgatatcggttttgatttagtcaaagaattaggtattgcggcaaacgccatggaagccctctgcgaccagaaggacgaaatggaaatgatcgcgcgtgagtacctgactgtttcaagaaacgctttcttcatcggccgcggccttgactacttcgtatgtgtcgaaggcgccctgaagctgaaagagatttcttacatccaggcggaaggcttcgccggcggcgagctgaagcacggaacaatcgctctgattgaagaaggaacaccggtctttgcgctggcgacacaagaacacgtcaacctgagcattcgcggaaacgtgaaggaagtcgcagcccgcggcgccaacacttgcatcatctcgctgaaaggcttagaagacgcagacgacagattcatcctgccggaagtcaaccctgcacttgctccgctggtatctgttgtgccattgcagctgattgcttactacgctgcactgcaccgcggctgtgacgttgataaaccgcgcaaccttgcgaagagtgtgactgtggagtaatatatttaacccctttggttattagccagaggggttttttaatgcggaaatgagaaatacatactctttgcgattgtaaagaaatccccttttatatattgaaaaggagtaacacctgctttataatacgagatgcattccggttaaaatccataaatgtaatcattagtaaatcatttttgtgcatgcctcatcagaaagtaatcaccttcagcagttttcatcatgaatatcccattatataaatgtaatcaatcgattacacatccacattatgcttaagactttaaaatccctgttgtatttgccgactcctgatccattatgaatactcgactagatataaaaataacaacatttttgcaataatccggttcaattctcaaaaaaagtctgacaacaatgataggagtggaatgatgtcaaaccttttagaaatcagaaacatcagcaaatcttttggccataaagctgctttaaaggatgttacattcaatgtgcctgccggatcaattgtcggttttatcggtgataacggcgcaggcaagtcaacaacatttaaaacgatattaggattaatctctcaggatagaggtaaagtgaaaatctttggtaaagagaatctggataaacatataaagttcaaagaagatattggggtcgcatttgatgcgatgaatcttcctgcgcaccttacgataaagcagctgaatcatgtatttaagaaactgttcgaggcttggaaccaagatcatttttaccggttggttcattctttctctttacctatggacaaaaaagtgaatacattctcgcgcggcatgtcaatgaagttatccgtagctgttgctttgtcgcataatgcaaaattattacttttggatgaagcaacgggagggcttgatccctcttcaagagatgatctgttaaatgaattaaaaagctttgtgagcaaaagcaacggcggtattttactttcatcgcacattatgactgatgtcgagaagatagccagccatatcgttattatgaaagatggcgaaattttattaaatgaagagaaagataaggttcttgaaagctatactgttatagatgttgatgaaggccgattggctgagcttgacgaagatatcgttctagcaaaaaggaatcatggatcttattggagtgtgcttgtatcggatcaacagaaattgccgaatggcgtaacggccaacaccatttccatagaagaaatcagcgtctttttaacgaggagtgaaaaaattgagaggtctgttactgactaactattacctggtttatcgaagtttctttgcatacacggggttggccatattggtatcagcagtcattttttattttggggatgcttcaatgcatcgttttgttgctatgctgattattttgtttgtcgtcatgcccgcacttgaggttataaagtatgagagcaagtctggctatgacaggtatgtcctgactttaccggtcagcagaacaaatattgttcaaagccactatgtcttttatcttttgattgttgtgatcggagctgtaatatcttatggtattttccttgtatacagcctgggttctgatgaaccaattgacggcatatttaatattgtctcttttggaacgttcatcgttctctttgccggtgcaatcgtttatcctcttctctacatgataggcccggaaaaatccgatgctatcgtgattggaggagcaatggggggactttttgctacgtttggattgcaaagtgtcgttgggtatgtagcagaacaagtaccgctgtcatttttgcacataaatccttctttatatgtcccgattatatatctcatgatcggcgttatcttatatatcatttcatttttcattgccgcagctatatatcataaaaaagaattttagcaactgatcaagttacaacaggataagacatggcacgggctcataaattcactttaactccaagcagacagccgcccgcacaatgggcggctgttcttctaattaaaactgcgttgtcacatcgtactcataatcaatcttcaatttcacatttttcatagtcgattttgctgttgcgagtgtgttgtatttaaaattccagatgcttgagactgagaggttatcatccagtgtgataccgtaatttccttgagtggagctgtttgcaagtgcacggtgccacactttattttcttccgacatgatgtagtggcttgtatttccttggcttggtgtttgggttgcggtggtgttgattcttttcactgtggcgtctcttggaatgcttgtctgtttggttaagtcgagtctaagaacagttgaatctgatccattcggactgaggcttgtgttccctttattttcagctgtaccgctgaatgagaaggtctcactgccggatttgattcggtcgtaaatagagagagtaaagtacatatcgtcagtgtaggagccgcgggacactttcacgtagaacgtctcgttattttctttcgcatctgtatccgcatagataaaaggtagcgccgtatcaggatttatcacttctgtgcctttactgatcagtactttatttttattataaatttcaatgtccattcccttgtattcacttcttgttgaactcctgacataaagtctttctcccttatttgccgtgaaagtgaaatacgaatctttttccccttttggcaatatggcagtatcaatatttttatatttccagtagcctaccggattggcagtttcaaatgaatgatttcctgtaatggcgcttatttgtaacgagttcttttgagacgcagaggctgaaggtgaagatgcaaacaatgcgcctgataatacgattgcactgacaaatagaatcaatatacacttcttcatggaaaaatccccctttttgactacatcatacataaaaacattagctatgtaaacatttgttatttaaggttaaaatctactggaagacagccgataaaaacactagaacatcatctcaagcggaggttaaaaacatgcgcctaaacgctcgatatataaaaaatcaagtaatggctcagcaagtgcttcagcggtattcttccaaaacaaatgtgaaagatgcggcaaaaggatcggacagcttattgattcagacaggcgggagccgcgatctgagccaggtgaattattcaaggagcggtgtcactgagaaagggagcagcctgtcccgtttatatcaatctgcaaatcagaaaacgattacggataatgggaatgagacggtaatagacgctaataatccatatgagtctgagagtgatattgcgagcaagattcttgatgagaaatacagccgtatcaatgaaatcaataaacgaaaaccagatcctttgcattatattaaggacaaataccagcgtgccgattcaccttatttcagaagtgatttatcagaatcggagcgtcaggccgcttatcataatgaaacggaatggctgtttaaggggaaagcccagagctatgatttccgtgatgcggcgtttcggggtgaaacgctcaacggagagattcaagtcgaaaatgaaaaggtgtttcagcgcgggcaggtgaatcagcagattgagatgcttttccatcggaatcatattcagattccggagggtgcgaatcttacatttacgatatcaccgattgattatctgttaaaagtgagcgggactgacgataaagagctcactcagcagattgaagctgtcttaaactccggggaaaacagcaaagagctgtttgcgcacatcattcgcagccggtgtgatgactcctcgcagtttacgccggaaacatatgagaaatatcaagtcgttcgggaaatgtacgaggtgaccggctatcatctgaaagacttgcagatcgtggacggaaagtacgtcacagaagacggacgcgaccttttagacgtctataaggaagcgctgcagcaagatcctttgttgagacatacggcggcagaagcggccgcccattacggacaggcgctcacgaagctggcgagaacgggttatgatgccattcctgatttggttctgtccattgagtataaaaacggatctctgcgtgatgtcggccaaagcaggcaatacggatctggggatacagattggctttctgaatggaaacgggagctgggtgtgcgtatataaaatgagaaaaaagctgacgaatgatgccgtcagcttttctttatgcgtttacttaaaactcctcatactccgccggatcttggccgtttatgcgtccgtcggggcgggtaagcgagtcgataatgctcatgtcgttttcatcaagggagaaatcaaaaacggagatgttttcaagctggcgctcgggcgatgctgattttggaatcgggatggcgcccagctggatatgccagcgtaaaatgacttgagaaatggttttgccgtatttgtccgcaatctgtccgagtttttgatcgttcaatacttcgccggcccgggataacggactccatgattctgtcacgatgccctgttcttcgtgccattggcgctgctgctgctgattaaaagcgggatgcagttcaatttggttgatgccaggctttacgccggtttcacgttcgagccgttcgatatgctcaggcaggaaattgcagacgccgatggatcggatcaggccccattttttcgcatcaatcagtgcctgccatgcttccgtgtagcggtcttgtttcgggttcggccaatggacgagatacaggtcatagtagtccagaccggcgcggtataaagattcttggatggtttgtacagctttgtcatagtcatggtagcgcccgggcagcttggacgtcacgtatagctgttctctcggaacagagcttctcttgatggcttctccgaccgatccttcattttcatagttataagcggtgtcaatcagacggtagccgatatcaatggcgctggtaatggcatgaacgccgttgtttccattaagagcgtatgtaccgaagccgatcacgggaatgcttgtcccatccagcagtttcttttgcggaattgctccagtcatcattaaatccctccttgttttctactttaccattattcttacaaatgaaacataataatggaaggaaatgagatgatccgcacatgaaaaaagctgacggagaaccgtcagctttaaatttgaaacatccatactacgacggggccgaagaccgatcctaacacggcgcagagcgtcatggaaacagaactcatggagaccgttaattctccgtactccattgcttttgaggtgccgagcgcatgggaagcgctcccgaatgcaattcctttcccgagtgagctgcggatgcggatccacttgagaagcagcggtcctaagataacgccggaaaaccctgcgatcatgacgaacacgactgtcatggaagggacaccgccgataccggacgcaatctgtatggcgacaggcgtcgtaattgattttgggataattgacaaaatcaaactccgactgatgccgaacagctctgcaaatagcaggccgctgaccattccggagaataaaccggccaacacgccgccgatgatcggaaacatatacttgattaacacccggcgctgcttataaagcgggtatgccaaagccaccacggcgggtccgagcagtgaattgatccattgtccgccgatcatatagtcattatacgaaatatgaaaaacaagcagcacggcaataatgaaaatcgtagtcgtcaaaaccggtatgagaaagggatatggaaagcgcacatataatttcaccatagccagataggcggcggccgtgaacaaaattataaggattgcgatacatgcttgctgcacttctttttctcctttctctgattggctttgtgctctaacagctggctggcgtaccctgcggcgatcattgtgacgatggtgctcagcacgatgatcagaaacagagcagccccgctggcggaaaacagtgacgggtaattgatgacgcccgtcatggccggaatgaataacagcggaagaaaagacagcaaaaatccggctccgtcttcaatcattttgacgggaatgatcttaaccgataaacatatgatcagcaggatcaaaccgatgatacttccgggaatgggcaggtgaaagaactgctgaacggctcccccgataaaggaaaatgcgaataaaataatgatttgcagtatgatgcgtatgactttcacgacaatgctgttctttggagaagagcagcttccccctttcttgatgcttcggtaagtttctttactttttacgcatatatttgtactatacaaatatatgtatgcaaaatctttctatatgttttctgagtaaatgtgcatatgtttgtattatacaactaatattgctgttgtcaatgtaaggagtgaggctgtttgtcaaaacaagatccgattgaattaattgaatatgagctcaccacttttatcaggagagctgtttatcttgataactccgaccgtaaaatcggacatctggaaagggctgcgtatttgttattacggcagctggatgaattcggaccggcgcgtgtaaaggaattagccgaatcttttaagctggatatttccacattgtcacgccaagccgcggccttggagtcgaaagagctgatccagcgtttttccgatccttctgacgggcgggtcagtctgtttgcgattacgaagcttggcagacagaggttaaaaactgataaaaagatgcgtcttgagcggtatcatcgtatgcttgacgattggtcaggcgatgaaaaagaaatgttcggccggcttttgctgcggctgaatgaggcatttatcgattaatgcatgatttttgccgagttaagcaggattatggcgtatacaagggagaatggaagagggtaaggctttacgccattctgcttagcaaaaataatattgaatagggggcggaacatgtttctccaggggacatcctgtttctcggaggctgcggcatttattatctcaatattcataattcaataaaaatgaaagcgctttatttttagtttgttgatttagggtgcaaggtgtttacctgaaaaaaacaattgtattttccacggaaatttattatgatggaataaggaaattggagattatataacaatagaaagatagaatatttctaatattgcgggaaatgaagagtgagttaggttcaacaggtgcaccttctgcttcattatttcacatatatcagagctgttaagaggaggaagcgaagtggcaaacaaagaattaaagagaggcttaggcgcgcgtcatatacagatgattgcgctgggcggcacgatcggtgtcggtttattcatggggtcatccagcacgatcggatggaccgggccgtctgtcctgctggcttatgcgatctcgggtatctttatcttttttatcatgcgtgcgatgggcgaaatgctctatgtagagccgagtacagggtcgtttgcgacgttcggccataagtatatacatccgttagccggctatatgacggcgtggagcaactggtttcaatgggtgatcgtcgggatgtctgaaattatcgccgtcggttcgtatatgaaatattggtttcctgatctgccggcatggattcccggcattatcgccatggccattctcggtgcggcgaatttaatttcggtaaaatctttcggtgagtttgaattttggtttgccatgatcaaaatcgtcaccattattctgatgattgtggccggaatcgggattattttcttcggtttcggtaacggagggcatgcgatcggattatctaatttatggtcgcacggcggtttctttacgaatggtttttcaggatttttctttgccttgtctttggtcgttgcggcctatcaaggggtcgaactgatcgggattacggcaggggaagcgaaggacccgcaaaaaacgctgcgaagcgcgattcagagtattatttggcggattttaattttctacatcggtgcgattttcgtaatcgttaccgtatatccgtggaatgagcttcactcactcggcagtccgtttgtttcgacatttgcgaaagtcgggattacggcggcggccggtttgattaactttgttgtgattaccgctgcgatgtccggatgcaacagcgggatattcagtgcgggacgcatgctttatacattgggcgtgaacggacaggccccgaaattctttaagaaagtttcttcgagcggtgtgccgatattcggtacgtttgccgtattaatcggacttgtgatcggtgtcgtgctgaactacatcgcgcctccgaaaatttttgtctatgtgtacagcgcgagtgtgctgccgggaatgattccgtggttcgtcattttaatcagccatctcggtttcagaagagcgaagggcgctgagcttgataagcatccatttaaaatgccttttgcgccgtttacaaactatttgacgatcgctttcttactcatggtattgatcggcatgtggtttaacaaagatacgcggatttctttggttgtcggggtgattttcctggcgattgtgacggtcagctattatgcgttcggtatcggcaagcgcatgcctggtgaaaaatcgaaaatagaagacgctgtataattcaaaaagacacctctcttacaggggtgtctttttcggcttgtccgcgagtggtatactggttaaaaaaagcagaaccgggggaaacatcgatgagtcattaccgtacgttattatttgatatagacaatacgctgctggattttaccgcttcagaaaccgatgcccttcaaaaattgtttcaaggttcaaagctggagctgacggcagaggtggaagcccgttataaagcgttaaatcaagggctgtggaaggcgtttgaagagggggaaatgacccgcgatgaagtggtcaatacacggtttgcccttttgtttaaagaatacggcctcgaagccgacggcgtgctgatgaatcaggcgtaccgccaatacttagaagaagggcaccagatgatagacggagcttatgagctgattgaacggctgagtcctttatttgatttatacatcgtgacgaacggcgtctcaagatcacaatataagcggctgggcgactccggtctgtatccgttctttaaagatgtgtttgtatctgaggacacgggttttcaaaagccgatgaaggaatactttgattacgtgtttgcgagaattcccgatttttctgccgagggcggacttattatcggcgattcactgagcgcggacataaaaggcggtcagatggcgggaatggatacgtgctggtttaatcccggaaagaaagcaaatgagtccggaatcatcccgacgtacgagattcattcgcttgatgagctgtatgatgtgctgaacgtggaggttgtcgctttatgatttctcaatatatgtataatataatttatatcaagttgtctcaggaaggattattatgaaaaatctttcttcaattagtacaagagtgctcatagaaaaaaccattatttggttttccttatattctattatcagttctatttttaaaacgccaactttcacggcttcggaatccgcttacctgctgataatcaccatttttttagtcgtcaacgatcatatcagattaaaatacctaagcggtcagtattcttttagatattatgcatcttttttagtaagtaaccttttatcaggcattttattgtttaaaattaactgtctcggttctcaaatatataatattttcttactgatcgagattattgtaacaactcgtaaactgccctggactgtagtaagcctgcattttattattttttttacagctcttaaagcagcagggaccagcgggaaagatatattgatgtcctatttagtgatcatggctattatttatctgtttagaaacgtactgctcgaaaaagcaaaaatacaaacattaaataaagaattacaaagtgtaaacactaaacttaagaattattctcaaaagattcaagagttaactatttctaaagagcggacaagaattgcacaagagcttcatgattccctagggcattatttgatcgcattaacaatgaatcttgaattcgccgataaaatagtcagtaaaaatcccagcgaggctaaacaagtcatcaataagtcacatgatttatcgaaggagtgtattattaacctgagagaagctgtcgctttgctcaatgaccctgctcctcaaaaagggcttctgaaatcgatcaatgagatttttgaaaattttcagcaaacaaatgaaataaaattcgagcttgatatggacaataaagtagagtcagctgatcctgatatcaagaattgtctctataaaacagtacaagagtctataacgaacgggataaaacatggaaatgctacgtttttttcaataagaatacgtaagtcttttgaaaaaatctctatatcgataactgataacggaacaggatgttctgaaattaataagtcaaatggaataaaaggaatagagaaaagatttgctgcacttggaggagaggttgattttcattcagggctagattcaggatttactgtggaagccgtaatccccgagatagcagatctttaatccgaatgtgaggaggtattgatatggatattatcattgtggatgatcagcaaattgtcagggaagggcttaaaatgattctgagtctgcacgaggaaattaatattgtaggcgaagcttctaatggtgaacatttattagatttgctaaaacagataaggcctgaaatcattttaatggatataagaatgcccataatggacggcattgaagcaacaaagctagttaaagagagatatccggatattaaagtgattatcctgacaacctttaatgatagtgaatacatttttactggactgaaaagcggtgctgatggttacatactgaaagattctgattcacaagaaattattgattccatcaaaacagcatgtgaaggcaatattctgttaaatcctaaggtaacgctaaaagttgtaaaggctctaaattcggtagaacataataaagaacttgttcaagaaaataatgaaaaggaacagctggtgcaattgcttactcccagagaaaaagaagtcgctaaacagattatggaagggaaaagcaacaaagctataagcgaagcactttttattactgaaggcacagtcaaaaattatgtatcaagaatactggaaaaacttcaaatgaacaatcgaacggagcttagcttatatttacaaaagcatatgtgattcaacttttttccttcaatcagaaaggaatttcatcaaattcctttcctccattttcttctgaatatatccggacttacaccttccgtatatgactaaagtaacaatgagattcctaactaaagtaataaggtaaatgagtactatagtaaattctaaaaatattccattcaggttaaaataaaagaaccgaaataccacgaggggtgttttaattatgctcgaattaaaaaaacttaccaaaaaatatgatgactttacggcagttaataatatttcgctgactgtagaagatggagaagtattcggactattgggtcctaacggtgccggcaaatcaacaatggtttctatgattagcactgttcttgcacctaccagcgggacaattaaagtagataataaatcacttaaggaaaaacctattgagataaaaaaaataatgggggttgttccacaggatttagctttatatgaaacgttaagcgccaaagataacttgaacttcttcggaagcctttacgggctgaaagggaaaaagctaaaagaaagaactgatgaggttctggagattattgaactgacagataaaaaaaatcaaaatgtatcagagttttccgggggaatgaaacgccgggtcaacataggtgtggcgttaatgaataatcctaaattattaattcttgatgagcctacagtaggaattgatccgcaatcaagaaatcatattcttgaaacagtaaaaaggctgaataaagaaaaaggaatgactgttatttataccagccactacatggaagaagtagagtatctttgcgagaaggtggcaattgttgatcatggatctcttattgctttaggaacgaaagaagaactcaaggaaaacttaaatgcttgtgacactttaaccgttacttttaagggtgctgatgaagaggcactcagccggataaacagcattacaggaattgataaagtgacggtagatcataaacaaatttcaatgcttgtatcgacgaaggaaagaaacatcattgaaattgtagatgatatcaaaaatctggggatcgacctcactagctttaagtacgaggaagtaaatttggaaagcattttccttcaaattacagggaaaaacctaagagattagtaggaggaggctatcttgagaaaattattcaacttattttttcttgattttaagctgttaacaaaaaataagtcattttatttaaagctgatgctgtttccatcactgctaatcctcatattgggcagtgtgttcagtaattcagattcaaaaatcgaagcatttgatgtagctttttactcagcagattcaggggagagtgtttctttaggtgatatcttaaaggataaagtttttaagaaaggcgatctcaaagatatcattcatttaaaagaagctgagagctacaatgacggtgaaaaattagttaaagaaggaaaggctgcagcttttatctatgtaccggaacactttacgaaagccgttatgaacaacgggaaaacaaatatcgatttaattggagataataacaagaccatagataaaaatattgttcaggctgttttggagggctttacgaaaagcgtgaaaacaatgagcgctgagcaacaagaagtaataaaacatatcagctccggcggcagcgtaccaaaagaaaaaatagaaaaaatgatgaacgatttggccgataatgacgggatctccgctgatatcccaaaagcagcgacaaataaaaatgcggttcctgtcgattccatgcagtattattcaattgcaatggttgtcatgttttccattatgacggcttttgtgcttgttcacagcattgttgatgagcggcagaataatacgctgttcagaattaaatctacaccgactttaaatattcagtatgtgcttggaaagttgacaggtattatttttgcgatcttaatgcagatgactgctgttattctgataagctgggtcgtattccgaatgaactggggcaacttgtttgatatttttgttattacggtagtatacgcatttgctataggcagcattgtattgttttggggttttaccgctaaggaccacgtggcggtgtccagtatggcttctccggttctttatatttttagttttttgggaggcagttttatttctaagaacggactgcctgatagcttgagggttgttcaagagatcataccgaacggtaaggcaataaactcttatttaaaagtcaaacagaatattggtcttagcggcatgtatattgatttgcttgagctaattggtattggtctcatctttgtctttattaatattatggtattcaaccggaagaaggtggcgtagtagtgcaattgattgccatgattaaacatcagctgaaactgatgctccgaaatagattagcaatttttgcaacgatttcggtgccgttaatccttacatttttgttctctttttctcaagatacggatagcaaagagaacttgtatatagccaatgctgataaaagtaactatgctgcaaagctcattgaaatgataaaagagcataaaaatattaaagttataaagctaacggaaaatgaattaaagaaaaaagtcgatgatcaggatattccttttggggtcgttattgaaaaaggttttggaaaggatttgacggacaatcacaagataaaaatgaaaatcatccaaaactacgagaacggcagcggaacattgttagagcagctggtcacaaatgaggcgggaactcttaaaaaggtagttaaagattcgcaatatatgtctgcacagttgcatacggactcaaaagatatagaaaagaacattttcaagaaattgaaaaacaatttaggaatagaagtgaatgacaaaacattaagtcagggtgaacatactcaggataatgcgaccgtgagattaattggttttcttgtaatgtttatttggtttgttgttattcaagggttaagaacacttattgatgaaaaagagaataatactttcagcagattactaagtacgcctataaactatacaaaatatgttttatccaaaatggctgctacttatatttccggaatcattcatataatcgttattatacttgcgggaaaatatttactcaagatcagcataggtcataacatctttgccatcgctgttatgctcgctgtttatttatttgcattgacctgcattacgatgattatggttccatttatgagaagccaaaagcagtttacttctgccgcatcgatcataattgcagtaagcgggatgataggcggttcctttttctcattggaaattgctccaaaatatatgcaggttatttctaaatttacacccgaagcatgggcaatacagtctttaaacaacattatctttagtaagagtaccttaggaactgaatggcttccgatcgtaatttttgcaagtgtcggcttattaagtattattgtatctttcatcttaataagcagggagattaaaaaaaagaaaaattaaatcaacaataatctgataaaattaacagatcaaaaaggacgtgagggaattgggtatggaagaactatttggaatggctgaattaattataggtgtactcatgaatgtatttatcggtaaaatcgggcaagttgcttttggaaaagataacagaacaacaaggatcattttaagagtaataggaatcttcctcatcatcaacggagtttcaagagcatttcatatataaaatgagatagtaaaaaacatccttttcagggtgtttttttatcgggttattacaaaatttctgaggtgaattatgaaaaaaatattttgtcttccgtatgcagggggatcaagtgcaatatactataaatggagaaggttaatgagtgactctttaacaatacatcctattgagttaaaaggaagaggtacaagaattaacgaagatttttatgaacatatagatgaggctgttaatgatatatatgatctgataaaggatcaaatcagggagtgtgattatgctttattcggccacagtatgggaggccgattagtttataagttatatagtaaaattgctgaaatgcagcagaagaagccaaatcacatatttttctccggctgcggcattcctaaaacgaagaaagcagaggggatgattcatgctttgccggataatttatttttgcaaagaatcatggatatgggcgggacttcggaagaactgttacataacaaggaattacaacaattatatcttcctattttaagaagtgatttcaaaatgttggaagaggatgtgatttctgaaaataagactgttatggactgtgatataacagtgttgcatggtaataatgacaagacgataagctcagatttaatatgtaattggggacattatactttagggaaatgcaatttttatacgtttgaaggaaatcatttttttattcatcaattttcgaatgaaataactgacattataaataaaaccttgagatgaatttttgattaaaaaatcgggagtgttactttgtcccggttttttttttatgttaatacgaaaaataaaaactaggttaatgtgcttaggtgtttttccccccctaattgacaactcttaaacatttgtataatatttcttaaagatggctagttcttcttcattatcctttttttaaaaaaagtgtttgtacgggtctatatcattaaaaaatggtttttgctgccgataaataaactgtcagactacaacaacaattattggtgagcggtattgcctgtgatgcagtttaacataaaaatccaccgaaagcctctgctgttttaattcagtgaatgatttgaattttgatatcaattgaaggagtttttgttatgacaaaaagtataaagggagataaagacagtattggtgagttaaaaactgaagagcattttttagtggcaagtaaaccttctaaagaaaaaagaatgaaaaatcttacatataaattgtcacagcaattaagcgataagctgaatgtatactgcaatggatcggatgaacgtctgcatatcgtattaacagcggcactgactttgttaataaatcaatatacagaaagacaaaatattgtaatcaaaactcctgttttcaaaaagaacagaacgattgattgtgagcaagaaattttgactcttaaaaatgctgttcatggtgaagacctattaaaagagatcatacataaagtcgaattcaccgtagaacaggcattggaaagcccccaaaataattctcgaacaagtgataaaatgactggccttccttttgatgtcatgatagtccttgaaaatattcaagaatacatacttaatcaagaaaatcccgctattcatatcctattttcgtttatgaaccagaaacaatacatagagacagtcatacactataacgaatgcctctattctcaaaatatgataaaagatttgtcactgcgatttcagatgatccttgaagctatgataactcctgaaaatatcagagtgaaagatatgagattcctgaaagaaaaaaataagcaaaagaaaatctttggctgggaagacaattattcgaaaattggaacaatttcggaggtgtttgagcagcaggctgatgaatattcggataagactgctttggtactagaaaactcttcaatgtgttacgcagaacttaatcaccgtgcgaaccagctggcacggtatcttcaggagtgcggagtaaaacggggagaccttgtcggaattgctttagaacgctcttttgatttgtatattagtattctggcaatattaaagtcaggcggtgcttatgtgccgttagaccctcaatatccgaagcaaagactatcattcttaatcgaagattcaggtgtagagttgctgattacaaacgaaagcattcagtcacaactcccgcctcacggggacggcgtaatctgtttggatggtatgaaagaagaaattgaaaagatggatggatctaatattggcataaaaggttccttggatgacctggcttatgtcatgtatacgtcaggctcaacgggactgcctaaaggagtaagtattgttaaccgcggtgtgattcggctggtgaaggagactgattatgcggtatttgatgagaatcaaacgtttctgcaattagcttctgctgcttttgacgcttctaccttcgagatctggggctgtttattgaatgggggatgtctggctataatgcctccgggaataccgacggctgatgatattgcagaagctgtgaaaaaatataacattacgactctttggctgacggccggtttattttctctagtagttgatcagcagttagaatcattaaaaggacttcagcaattattagtaggcggagatgtggtttccgttccgcatgttcaaaaagtattagcgcttggaaaggtacaagtaattaacggatatgggccgacagagggaacgacctttacctgttgtttcccggtccctcatgattggaaaggcagtatgcttcctatagggaggcctatttctggtacagaaatattcattttagattcgcaattaaaaccggtagcgccgggaattcctggtgagctgtttattggcggagatgggctggcgcgagagtattggcgacggcctgatttaacgaaggaacggtttatatcacaccctttcaataatgatccttcagcacgtctttataaaacaggagacttagtgcgttatttagaaaatggcgatgtggagtttattggacggcgggacgagcaagtcaaaatccgcggttttagaatcgagcttggggagatagaagcccgattgatcaatcatacagaaattaaagaagcggcagtaacagtaaatcataatggtgatgaagatttatatatctgtgcttattacacttcaaatcataaaatcgcaaagattgaattgcagcactttctgagagactttcttccggaatatatgattccatcgtacttcaaacaaatggaaaacatgcctttgacggtaaatgggaaaattgacagacgggcacttcctagacctgatatatctcaaatgtccgaaacaaaatatgaagcgccgacaaatgaaacggagaaaaaactttcggagatttgggaagctgtacttggcagggaacgcgtcggtatagatgagaatttctttgaaaccggcggtcattcactaaaggcttctatgttaatttcccgcatcagaaaaattttcggtacggatataaaggtgaaggagctttttgaacagcctaccatcaaacagctgagccgtcttattcaaaagcgggataaacagaattatccggtcatcagtaaagcgaggaagcagtcttattatcaagcatcatctgctcagaaaagaatgtttgccctttgggagacggataaagacagtatcgtttataacttgccgattatgatcgaactaaatggaaaattagatgtaaaaaaagccgaatcagttttacaagagattattggcagacacgaagcgttacggacaagtttcgatgttgtaagcggcgatgtggttcagattattcacgatacatgggagctcgaatttgattatcagaagctgccgtctaatgggatacgaccatatgtgaagcagtttatcagaccctttcatttggacaaagcaccgttaatcagagccggactcataacgtatgaagaccggaatctgctgctgctggatgttcatcatatcgctgcggacggtgtatcggttggaataatccgcaaagaattcaatgcgctgtatgcgggtcataaactaaaacagccgccgctgcaatataaagattattcagaatggcaagtaagctcaggaacaaaagaggcgttaaaggaacaagaggagtattggcttaagcggttaagcggagatctgccgattctcaatctgcagactgattatgagcggccgagagtcaaaagctttgaaggaagccgaatcagctttatggccgatgaaaggttaacatcaagcttaaagtcggtggcgaaagaaacaggaacaactttgtacatggtgctgctggcggtatataatgtcatgctttcaaaatacagcggccagcaggatgtgatcatcggaacagcagagtccggaaggtcagacaccgaactggagaatacggtggggatgttcgtcaataccgtcgccataagaaattttcctgaggaacataaaacattcagagcgtttttagaagaggtcaaacatcatacgttaaaagattttgagaatacagattaccaatttgaaaatattgttcaaaaactcggggtaaaaagagattcgagccggaacccgctgtttgatgtcatgtttacttttgagagtaaggattacggattcggaggaaatgaagagacagcagaatcaaatttactagtatctgaggtcaatatatcaagatttgatttaacgttaactgcaatggaaaccgataaaggcgttaacttccaattggaatattgcaatcatttattcaggaaagacacagtcgaaagaatgggtgctcattatacccagcttttacaacaggttgtatcagaaccggacacggcaatctgcagactgaatatgataacggatgatgagaaacataaactgctttatgtattcaatgatacagcagccgacttcccgcataataagacaatccatcaattgtttgaagaacaagcggaaaagacaccggaaagaatagcggcagtgtatgaaaataataaagtaacttataaagaacttaacgaaagatcaaatagtctggcgagaacactaatgaaaatgggggtgaaaaaagagtcaatagtaggtattgttgctgacaaatcattagagatggtgttaggcatattgggtgtgctgaaggcgggaggcgcatttttgccaattgatccgggatatccttctgagagaatcaaatacatgattgaagacagcggttctgacattttattagtgcagaatagtcaggctgataatatcccgtttgacgggaaggttattgatttaacagatagttctctttactccggagatcggcataacctgccaatgatgagttccgcagaacatcttgcttatgtcatttatacttctggaacgactggaaaaccaaagggtgtaacgatccggcatatcggaatcagtaatctcaaaagtgtctttgaacatgatatgaatatcaattaccgggataaaattattcaatttgcaagtttttcatttgatgcatcagtgtgggaaatcagtatggcactgttgaccggagcggaactacacatcctttcaagtcaagtcatcaataattatacattatttgaagagtatattaaccggcatgacattactgtagccactttgccgcccgtatacatcaaccatataaatataaacggattatcagctttaaggctcttaattactgctggttctcagatatctacaaaaaccttgaaccggatcgtgaataaaatagactatattaatgcctacggtccaactgaaacgacaatctgctctacaatgtggagatactcagaagctgagagggcgatggcaaagaccattcctatcggtaagccgatcagaaatctgaaagccttcataattgatcacaacaacaatcttgtgcctattggtttagcgggagaattgtgtgtgtcgggtgacagcttagcaagaggatatctcaataaagagaaaatgacgcgtgagaagtttattgatcatccatttgagtccggaactaaaatgtaccgaacaggagacttggcaaggtggcttcctgacggaaacatagaatttttggggagaattgataatcaagtcaaaatcagaggcttccggattgaaactgatgaaatagaaagccagcttctgaaaataagcgggataaaagaagcagttgttatagataagtgcgaccttcacggtgacaaatacctttctgcttttgtaaccgcagaatataaaatatccggagcagctttgagggagcaattgggtgacattttgccgcaatatatgattcccggtgtcatcatccaggttgaacagctgcctctcacaccaaatgggaaaattgacaggaaagcacttgctgaaatagaagagcctaaacatataaaggagcaccttgaagcaccccgttccgaagtcgaacagattctggtaaatgtttggtcggaagttctgaaaattgatgatattggtattaatgataattactatgagctgggcggagactcaataaaatctatactgattgtatcaaagcttcaaaaatacagtctcagtctagaggtaaaagatcttttgcagtatccgcaaataaaaaacctcagtaaacacgtgaaattatataaagctcaaacagatcagagcccggttagcgggagaactgaactggcaccgatacaaaagtggtttatagagaatgactttgcggacatacaccactttaatcaggcattcatgtttcaaatgaaagaaaaaataaatgaacacgctctggcaaagacatttgaattattagtaaagcatcatgatgctttgaggttgatatatacagccgaaaatgacgaaataaaacaagaagtcagagatgtccaagccgcccgggatacttttactctggacatatatgatctgcttgctgatacggattacaaaaatacaatagaaaaacttgccgatcagttacaaagcggaatggatcttgaaaaagggcttttaatgaaacttggtttatttcgaacaatgaggggcgattatctacttattgctatacatcatatggtgattgacggagtctcttggagaattctgcttgaagatatggagcaggtctacaacaatctgcaaaaaggagagccggccgttcttccgccgaaaacggcatcctttcaagaatggacacgtaaattggcggaatatgcaaacggaagtgagataagaaaggaacttcggtattgggagaatatcgaaaaaacgaagattaaagaaattccgagagatttcaataaaactgacagtgtatataaggaaagccgcaccattactgtcagtcttacaaagcagttaacttataagctccagaggaatacaaatgcagcttataacacacagattaatgacatcttgctttgttcactgggaatggcagtaaaagaatggacgggacttgacaaggttttaatcggtctggaaggccacggaagagagaacatattagaaaacatttcaatagaaagaaccatcggctggttcacctcactatttccgatcgtgctggatatggagcacagtgatgatctgccttattgcataaaaaatacgaaagagtatttaagaagaatacctcataaaggtattggttacggaattattaaatacttgacggcacgggaacataaaaaagacatcagttttacgataaagcccgagatcgggtttaactatctgggagaaatctctcaaaaaaagcgggctgtttttcagcatgcagatatatcatctggtacaagtgtttctttatctaataaaaaattgaatgccatcgaaatcaacagctttattatggacggtcaactgcagttggaatttaactatagtacgaaagagtttaaagaagaaacaattaagacattaaccgaatcctatataaaccggttaatcgatattattcagcattgcgaaatgaaaaaaattcctgaaaaaacaccctttgactatggagatctggatttatccattggagatttggagcagattttatcaagcggaaaagagatagagaaaatccactccctgactcctatgcagagcgggatgctttatcatgcattgcttgatccgttttcacaagcctattttgaacagcttacattttctttatccggtcagcttgatattggcagattaaatacagcttttaatatgctgatcgagaagtatgaaatattaagaacatgcttttttcatgaaggactaagtaagtttaaacaggctgttctaagagagagaaaagttaaaattgaatttgaagatatcagcactttctcggaatatcaaaagaaagtccggcttaaagatgtccagtttaaagacaggggaacgagattcgatttgacgaatgattgcttaataagagtaaccgtattaaaaactgatgagaaagaatataaactgctgttcagttttcaccatattattatggatggctggtgtatgagtttaataatgaatgatataaaaactatttatacgtcattaaaagaaggaagagagacagtgcttcagcataccgagccttacagcacctacttagaatggctggataatcaggacaaaagtgccgcattagaatattggggggattatctaaatgaatatgagcagcaagccggtattccaaagttctgctgatgagggcggtttcaataataggaagaaaacattcattattgatgaaacatgtacttcgatgttgaaagctgcagctgatcaatatcacattactttaagtgcattgattcagactgcatggggagttcttttgcagaagtataacaacgtgaatgatgttgtgtttggtgcggttatttccggaagacaatgcagagtgcaaggcatagaaaaaatggtggggttatttatcaatgcggttcctctgagagtaaaaggcgatggtgatacggtatttatagcattagcccaaaagctgaacagtgactttatcaaagcgaatacatcatacggttacagttctttagcggatatacaagctcttacaaagatgaaagagaaactgatcaaccatatgctggtttatgaaaattaccctgttgatgactatggcaaggcggtcgatgatacaactgatgctttaaggattacagatatggaagtgtttgaacagacgaactatgactttgggctggttattattccaggcagccaaatcaaagcagagatgacgtataacaataatgtttatcgtgaagatatcattaatcgtataggtgttaatttctgtcatgtattaaagcaagtggcaactgatcctacgcgtgtcctgaaagacatcagcgctgtaaatgaagaagagcgcggaatgctccaggagtttaataagcagtcctctaattataccgtgaataaaacgatacaagacctttttgaagaacgagcggaaaagacacctgaccaaacagcggctgtctatgcaggaaagcatatcacttataaagagctaaacgaaaaggctaatcaagttgcaacattattaatggaaaaaggggcaggaaaaaacagcattacggctatgatgatccgtccttcagaatattcaatgattgggatactgggaattttaaaaaccggaagtgcgtttctgcctattgatgatgaatcaccggtcagtcggataaatcatattttaaaagatagcaaagctgatatcctcattacagatttgtgctttttagctgataaaaacattgcggcggaatgtttggatattacggataaatcgatttataccagccaaaatacatcaaaccctgatgttcagtatgatctcgaggacgaggtatatgttatatatacctcgggtacttcgggaaaaccgaagggggtgaaggtgaaaaataaatcattagttaattattcattatgggtatgtgatcaaataaacataaattctgacagcaggtcgttagtgacgtcaaaatatagttttgacttatgctataccagtatatttccggttttatccggtggcggacaagtccactttgttgataaagaagtgtatcttcactctctatcattaatagaatatattcataaaaatagtattacatatcttaaaatgacacctactttattttcaacattgatggaggatgttgacatgctggcgtcttgtcctgatttaaaagttatcatactgggcggcgaaagcataaacatcggcaacgtcaaaaagctcgctgaaaaatgcagatggatgaagtttattaaccattacgggccgaccgaaagcactgttggctgtattgcacatagcattgatctagatcatattcaaaactgtgaaatatacaataaaataggaagaccaattcacggcattaatatctatattgtggatcgttcagatcaactggtccctgtgggagcacccggtgagatttgtatcagcggggtaggtttagcatcgggatatgtcaataatgaagaattaacgaatgaaaaatttattgataatccttttcatcccggagcaaaaatgtacaaaacaggagaccttggcagatggatgccggatggaaatatagaatttttaggccggattgacaaccagatcaaaatcaggggttttagagttgaaatcggtgagatcgaaaaccaactattacagctggaaggtataaaagaagccgcggttgtttatatagaggagaaatatctttctgcatatattactggggacattgagatggaaggctcgttcgtacaggagaaattggcacaggctcttccgaagtatatgattccgagtttcataatacaactgaaagagctgcctcttacagctaacggaaaaatcaatcgaaaagaactgcctcttcctgacttgcaacggttgtcagtacctcgatacgaagctccggcaaatgaaacggaagaaaaactagctgaaatttggaaagaaatgcttgggcataaacggatcagtataaatgaagatttcttcgaactgggcggacattctttaacagctgcgttcactatttcccgcatcagaaaaactttcggtacggatataaaggtgaaggagctttttgaacagcctaccatcaaacagctgagccgtcttattcaaaagcgggataaacagaattatccggtcatcagtaaagcgaggaagcagtcttattatcaagcatcatctgctcagaaaagaatgtttgccctttgggagacggataaagacagtatcgtttataacttgccgattatgatcgaactaaat

SEQ ID NO: 9 - DNA, 55394 bp, Bacillus subtilis
cttacaggcaggttacccacgtgttactcacccgtccgccgctaacatcagggagcaagctcccatctgtccgctcgacttgcatgtattaggcacgccgccagcgttcgtcctgagccaggatcaaactctccgataaagtagtttgactgactacgcacatcgctgtgcgatttatttaaaactttgaattaacaggtacgttttgtcttgtttagttttcaaagatcattttgtctttcgttcaagcgactttattattatatcttatcaatctcttgaagtcaacaactttttaaatttcttttttcgtcagcgccttgtttagcggcaacgaataataatataccacctcacaaataatagtgcaatagttttttaaaagaaaatcaaaaaagttttacgagcggcttgtttctaaaaaagcgccgtactgcgataagcagaaacggcgccttcccttttattatcgttgtctcatttgagggaataataaaacgtctctgatagatggagcatttgttaacagcatgacaaggcggtcgataccgatacccaatcccccggtcggcggcatgccgtattcaagagcttcaacgaagtcttcatccatcatatgcgcttcatcgtttccttcttctctttcttttaactgcgcttcaaagcgttccctctggtcaatagggtcattcagctccgtaaacgcattagcgtgctcacggccgacgataaacagttcaaaacggtctgtaaagcgagggtcctccggatttttcttagcgagaggagaaatctctacagggtggccgtaaataaatgtaggctgaatgagtgtttcttcaattttttgttcgaagaattcattgatgatatgccccaccgtcattgagtttgtgatctcgataccatgctcttttgcatgaccgcgcgcttcttcaacagtcatctcattccagaaatctacacctgtcgcttctttgaccgcatctaccatgtggagtcgtttccactcaggtttcagatcaatctgctcttcgccgtactggattgtggtgcttccaagcacttcctgcgcaatatgtgcaacgaggttttccgtaaggctcataatatctttataatcggcgtacgcttcatacagctcgatcatcgtgaattcagggttatggcgtgtagaaacaccttcattacggaacacgcggccgatttcgtagactttttccaatccgccgacaatcaggcgtttcaggtgcagttcaatcgcaatacgcatataaagaggcatatcgagcgcgttatggtgcgtgatgaacgggcgtgcagacgctcctcccggtatgctgtgcatcgtaggtgtttcaacttctaagtatccatggtcatctaagtatcttctcgtcgcttggatgattttgctgcgtgtgataaacgtttgtttgctgtcagggtttacgatgagatcgagatagcgctggcggtaacgctgttcaacgtcttttaacccatgatatttatcaggaagaggacgcagtgcttttgtcagcagttcaaaagatgtcgctttgacagaaagctcgcctacgtttgttttgaaaactttccccgtgatgccgataacgtctccgaggtctgaagatttaaagatttcatattgttgttcgccgacactgtcttttcttacgtaaatttgaatttgaccttctaagtcctgcagatgcgcaaagccggctttcccttttccgcgctttgtcatcatacggcctgcaatggtcacttcgatcgctttttcttccagttcttctttagaaagctcctggtaggcgtcaatgatctgttgagattgatgcgttctctcgaaacgttcgccgaaagggtcaatgccgttttctctcagctggttcattttatctcgtctgacttgcagctggtcgttcaattcctcatgattttgctcttcttgactcattggtatcactccgttacattttgatttcacgaaaaagcagaaaaactgccagcggtaagctggcagtgagcagcaatagagggtgtatattaacctacttttgcatcttgaagctcttttgcctctgcttcggcggtaaatgcatctaaaagctgcacaacttcttcacgcgtctcacattggttaatttcgttgcgtacattcgcattgcctctgacacctttcagataccaggcagcgtgttttctcatttctctgactgccacattttcgccttttaacttaatcaggcggtctaagtgcagtttgcataccgacattttttcacggactttcggttcgtcttttaactcgccggtttcaaggtagtgcaccgtacggtaaatcatccacgggttgccgagtgcggcccggccgatcatgacgccgtcaactcctgtttcctcaagcatgcgtttcgcgtcctgaggcgttttgacatcaccgtttccgatgacgggaatggagacggattgcttcacttctttaatgatatcccagttcgcagtgccttcatacatttgcactcttgtgcggccgtgcagggcaacggcttttccgccggcacgttcaacggcttgggcatttttcaccgcataaatgtgctcttcatcccagcccattctcatcttcactgtaaccggcttatcaacagcatctactactgcggataccatttcataaatcttatcgggatcgagaagccatttggcgcccgcgtcacattttgtaatcttgggtacgggacatcccatgttaatatcaataatatcagcagtcgtgttttgatctacaaacttcgccgcttccacaagggtttccttttttcctccaaaaatctgaaggctgagcggtttttcacgttcatcaatgtaaagcatccccattgttctggcgttattgtaaagaatcgctttgtcactgaccatttcagcgcataccaatccggctccgaattcctttacagtcaatctgaacgctgagttgcagacaccggccataggcgcaagcacaacccggtttttcaattgaatatcaccgattttaaacatttttcccctcctttcatttgtctatttttcaggcggggccaattcgtccgcacttatatttaaaacatctgccgcatcttgaatgatggcatctgatggcaatcggtttccgcgttcaatttcaccgacaatagaaactgatatacctaatgcttttgcaaatccttcttgagtataacctttcagctttctgaatgcacgaattcgcctaccccagatttctgcttccatactcttacaccttcttggtttgtttcagcgcttatcgtgatatgatccgcctgcgggcatatttcttttaacggcgcaaggacaaataagcgctcatacattctcggatgcggaacaatcagccgctctgtttcaatattttcacgattatacagcaaaatgtcaaggtctgccgtccgcggtccccagcgaatctctctcgttctgcctaattcagcttcaatgctctgcgttacatcaagaagttcaaaaggagataacgacgttttcacttcaaccgccatattgagaaactgatcttgatcctcatagccgacgggatctgtttcatatatggaggacacctttgacaccgtcacgccatgatgccggctgagcatggccactgcctgacgcaaataatgttcacggtcgcccatattggagccgaggccgatatatgccgtattgttcatgatttctttctcgtcatttctatggctactgatttataatggccgggaatcggcgggtcaggcttaacaacctttaccgtacattgctgcaccggctcaaatttctcaaggacggtgtctgcgatccgttccgcaagggtctcgaccaaattaacgggctcgccctcaacgatgccgcggcagacactgtacaattccgcatagttaatggtataagagaggtcatccgtttttcccgctttgctcaaatccagttcggcagtcaggtctactttgaagcgctggccgagtttgttttcttcttcgaacacgccgtgatatccgtaaaactccataccttccacatatactttatccataatgtacgcctcctttgttcaacatagcatccatcatcttcgtcattcttgcgatctctttgacatcgtgcaccctcacaatatcgcagcctttttggacgccaaggcatactgtcgctcccgttccctcagcacgttcttcagggggaaggtcaagcacacggccgatgaacctttttctcgatgtcgccaggagcagcggataacctaacccgctgaacacctccagcttgttcatgacagccagattgtcctcatagtttttcgcaaagccgatccccggatccagaatcatgttttcatctgtgacgccggcttccgcggcaatttttacgctttccatcaagtctgcaagcatatcaggaataagatcgttgtagtttctttccatgcgattatgcattaagataatcggaaccccgtgtgcggcggctactgacgccatgtcagggtcacctttcgccccccagatgtcattaaggatagaggctcccgccttgaccgcttcgtctgccacggacgctttgtacgtatcgattgaaagcggaatgtccagctcgcttgtgatccgctctatgactgggatgactcgtgacatttcctcatcagccgacacgagtgatgcgccgggtcttgtcgattcgccgccgatatctatgatatgcgccccttcttcagccatcttcgccgcatgcagaagcgccctttccgtactgtcgtatttaccgccgtcagagaaggagtctggcgttacatttaatatccccataacgagcgtcttctctttataggacagagcgcctttttttgtatgaatcagtttaggctgttcaattgtttgctgcgccattttgttcctcctcctgtacattcgttttgtttatttcctgctgatactgcttacggagcaattgcaccgtttttccgctcactccgggcagcggcacttcctctattttagaaaacggaatgatttcaagcacggagtttgtcaaccatgcttcatccgcttcaagcattgattgaaaacggaatcggccttcggtgacttctgtcccctgccgtttcaattcatcaatgacaaactgtctcgttacaccatcgagaattcccgtatccaaggatggcgtaaagaccttgtctccttttcgccaaaacacgttggagacaatgccttccgcgacatctccttctccggtcaggaaaatgccttcaagattgggatcattcccgatctcccgtttagcatacatgttgtttaaatagtgatgggattttaaccgaaaagttccttcaggcgtatttctcctgatagagagaagcctgccttctttttgaacaggcagagtttccggattgagccggttgacgaaacaaaggacggtcggcttttcataagtctgcgcggcaaatcccttatcgctgacgcctgccgagatgttaagccggacacgcgcgctgccgtccttgatgtcattgaggagcaacagtctccgaagcatatcaagcagctcctgtttgttcacctcatatgcaatctgcagatcccgaagcgccctgttgagcctggcgacatgcgcatccggcagaaacggccggccgctgtaaagcctgaacgtctcgaacgcgccgatcccgtacagataaccatggtcaaaaggagaaagcgccgcttctttctcctctatatattgaccattcaaatatataatcacaccgtcacttcctttttgcggtgtgtctctataaagtttctgagcatctctttgccgaaggaggtcatgatggattccggatggaactgaacaccttcaacaggcagctcattatggcggattgccataatttctccttctttggtttgagcggataccgtaaaacaatccggcagcgtgtccgctttgacaataagtgaatggtaccgggtggcgacaagcggattttgcaggcctttaaaaatcgtctgtccgtcatgcataacttctgacgttttgccgtgcatgagccgctccgctctgacgacgtcgccgccgaatacttgcgcaatcgactgatgtccgagacatacgccgaaaataggaatactgccggcaaaatgtttgatcgcttcgaggctgatccccgcttcatcaggactgcacggcccgggtgaaatcattaagaagtccggacccagctcttcaatctgctcaatcgtaatctcgtcattccgtctgacgatcagttcctccccgagttcacccaaatattgaaccaagttgtacgtaaatgaatcataattgtcaatcattaaaatcatctctgctcacctcgtctaattttttgtctcttcttcgctcagctctaacgcctttttcatcgcaaaagcttttttgaacgattccttgtattcatgcttcggaaccgaatcaatgactactcctgctccggactgcatgaaagcatgtccgccggctgcatagatcgtccggatcacaatgttaaactgcaaatctccgttgaatccgaaccagcctatagatccagtataaagcccccgtcttgtcggctcaagctcttctataatttccatcgttctcactttgggcgctcccgtgatggtgccccccgggaacaccgcatgaataatgtctgtcgcgtcatatccgtcctgcagctctccctgtacgtttgacacgatatgcatgacgtgggaatacttttcgatcgccataaattcgttaacccgcacggagccgtagcgcgatacgcgcccgaggtcattgcgctcaagatcaacaagcatgacgtgttccgcacgttctttttcgttgtgaattaattcatcagccaaagccttgtcttcagcatcgtcttttcctcttgaacgcgtacccgcgatcggtctcgtttcaagcttcttccccttctttgtcaccaatagctccggcgacccgcatatcacttgaaaccccggtgtctcgagataggccatgtaaggagacggattgacgtttctcaagtgtttatacacctcatacggatgaacggataaggactgagactgcctgatggacaaattaacctggaacacatcgccgctcgcgatatattgtttaatttgttctacagcctgtgaaaatccttcctcagtgaacggtgcggcgtacgatccgtccccattccgattcagcggtgaaaaaggctcgtccgccgtttggagggaacaccacatgtcctctaagcgggacagcttttcttccgcaagatccgcttcttccgcttcagtatgggtaatgagccataacgcctcttcctcatggtcataaacggccacatcatcaaaaacaagaaagtaaatatcaggtgtttccagatcatctaacgacagcatcttaaaattctcaatatatcgggcgtagtcgtaactgataaaaccaatcgcaccgccctgaaagtccggaaacccaacgtttgtttccgttccgagcgttccaaaccattcatgaaaggcccgcagcgggtcaccttctttaaacagtgtttccccctcatgcttgatcgttgtaattccgtctttccctctgacggacgcaatcggatctagaccggctatactgaatcttccccctctcgcgctttcgagcagaacatgccgttttctcgatttcgaaaggttttcatatcgctgtaaaaatgcttgtttcgtaaaaggtatttttcttcctgccggtctgcgttgtgccatcatatcaatcctctgcttcgttttactgtagttttattttaaagcaatcacactggtgaaaaaagtgaatttcacttccaaccataaaattcgaaacgttttttggatttccgatgcttcaggcacaaaaaaactcccggatacagccgggagccgtgtatatgtctctattcaaactgataaagcggtgtgcttaagtaacgttctccgttactagggatgatcgcaagcactttcttgcctttccccagttttttcgcgatttccagtgccgcgtaaatggccgctccggaagaaatgccgccgagaatcccttcttcttttgccgttttacgggcatattcaaatgcatcctcgtttttgacgggaatgatctgatcatagatgtccgtattcaatgtttcagggacaaatcccgctccgataccctgaattttatgagggcccggttttccgccggaaagaaccggagaatccgccggctctaccgcatagattttgatggatggatatgcttctttcagcacttcgcccgctcccgtgatggttccgccggtaccgattccggccacgaacgcatcaagctggtcgtcaccaaactgttctacgatttctttccctgtcgtttggcgatgaatttccgggtttgccgcattgttgaattgctgaggcacaaagtatccgtgttcctcggcaagttcttccgcctttttaatggcacccttcattccttctgcgccgggagtcagcacaagctccgctccgtatgcgcgcagcagattgcgtcgctccatactcattgtatcaggcataacgagaatggctctgagacctttagccgctgccaccatagcaagaccgatccctgtatttccgcttgtcggttcaatgattgtgtcgccggcttttaattttccttctttttcagccgcttcaatcatcgccactccgatacggtcttttacgctgctgcccggattcatgtattcaagcttcagatatacatctgcactgttttcatccgtcaggcgattcaatttcacaataggagtatttccgattagttcagtaatagaatttgcaatacgcaccatgttggacacctcaatttccgactaaatttattggtattataaatataagttatcaatttcaaaattttttgtcaatcatttagttcttttttccccgtagaaccaagagacccccgcctctttccacagcgttttgactgtcgccttgtcacctaattgatccatcgcgatctggcgtctgatttggctcttcacttcattgtatgagaaagttctcgatttaagcttttctttcagctgaatgacggcgtatcctgaagaaactttaatcggttcagcggaccattcatcttctttaagacttttagcttctgtgatatatgcctgcgggatattttcctggttttctgtcacaaagccgaggtctccgccatactgagacgtatatctgtccgtggaacgttcagcggcgacggcttcaaagctggaaccgcctttcaaatcagcaagcaccctgtccgcctcatctttgtttttgacgacaatgtgccggattctgtaggaatcatcgaaatggtacaattctttatttttattataaaatgattgcatttccttatccgatatatcgatgtccttcgtcagcagttcttcaagaagaatgttgtagcggatctggtctctccattctttttcggtaatatggctgtcttcataaaatgaattatctaccgctttgattaaaagaaattcccgctccaattcgctgtttgaaactgtaagtttattctttttcgcaagctcttccactacttccgcattaatcatgtcttccagagttgattttccgtactggtcttccatctttttcatccagtcttgccgtgtgatatgtttatcaccgattgtcgcgatggattcttcagatgaccccgcggcttgggattttgttaacttatacgccactgtcacactgcatactaacagcgccgctacaataatcgtcaaaagtgttctcgatttcaaaatctaccccatcccttttataaaatagaacaacccgctaaagagctagcgggttgtttcgtcacgaagctcttccagttcttcttttgtaaataaatatttctcattacaaaaatggcaaaccgcttcggcttttccgtcttcttctatcatatcttgtatttcttttttgcctagtcctaaaatggccgtttcgaatcgatcttttgaacaagaacagtgaaatttgaccggcattgtttcgagaacgtccggtttttgacccagaacttcttctaagatttcttccggtgtcaggcctttttgaatcaattttgaaatcggttcgatttgagataattgcttttcaattgttgaaatggtttcttcatcagtccccggaagaagctgaatgatgaatccgcccgcagcgagaatcgtgttatcaggatttactagaacacctacgccgacagatgaagggacttgttcagaagaaacaaggtaatacgtgaagtcatcaccgagttcacccgagacaatctctacttgtcccgtaaaataatcacgcaagcccaaatcttttacgacactgagtgttccgtcagttccgaccgcccgtctgacatccagtttcccttgttcattgaggtcaaaatgaacgtgcgggtttgatacgtatgctcttacctcaccctttgcgttcgcatctgcgacaatggctccgatcgggccgccgccttctattttgactgtcagcttatcttcacccttaagcatcgctcctagcatcagagaagctgtcatcgtccggccgattgcggctgatgccgtcggccacgtgtcatgccttctttgcgcttcgttaaccatatctgtcgttctggctgcataagcccgcactttaccgtcatatgcaattgctttaattaaataatccatcgtttacctcctatacgtgacccacgcgatttcgctcataaatgatttccagccctttcagagtgagaaacgggtcaacaatatcaatacagtctgattcgtttgcgattaatgacgcaagcccgcctgtcgcaatgactttcggttcctgtgttgcctgccatttcatccgcttcactataccttcaacttgtccgacatagccgaaaaggatgccggactgcatagcgcttaccgtgtttttgccgatgatattgtccggacgggcaatttcaattcttggaagcttcgccgcacgtgagtacagcgcttccgtcgaaatcgtaatgccgggagcaatcgcgccgcccatgtattgtttgttttcatcaatgtagcaatacgtcgtcgccgttccgaaatccacaacaattaaggggcctccatactgctggatcgccgcaacggcattgacgatcctgtcagctcccacttctttcggattgtcatactttatatttaaacctgttttcattcccgggccgacaacttgcggctcgatgtgaaagtattttgtgcacattctttctaaagaaaacataatcggcggcaccacggatgagatgataatcccttcaatctgttcaaacatgagtccggaatgttcaaataaggagcggagcagcatgccgaattcgtcttctgttttgtgcctgctcgtttctatgcgccaatgatattctaattccccatcatgatatacaccaatcacggtgttggtgttccccacatctataaccagtaacaacctctatcaccacttttgaatagtttctaatcataacattttcaacattctacaataccatacacgatctgcggctcttttgtaaacaaaacgaaaccagtaaaaaaaccgccggtatacgccggcggttttcatatcagaaagcgaactattctttcggctcgtctttcttttcgtcttctgttttagacaggatgtttactttcacatcgtctttttgaagatggtcatctgagaaattgcgctcagggagttttccgtgatccacgagatgcttgatttgttccgcatctaatgtttccacatcaagcaatgtctgagcaatcaattcaagcttatcgcgattttcagtcaggatggttttcgcacgctcataacattctttaatgatgcgctgaatttcctgatcgatttcgtaagcgatctgatcactgtagttttgctcgttgttgaaatcccggcccaagaatacttgaccgccttgagattgaccgaactgaagcggtccgagtttttctgacataccgaactctgtcaccattcttctggcaatgttcgttgcccgctggaagtcattgtgagcgcccgtgctgacttcaccgaagataatttcctcggcaacgcgtccgcccagaagaccgacaattttatcgagaagttcaggttttgtctggaagtaacggtcttctctcggaagcatgaccgcgtatccgccagcctgccccctcggaacgatcgttactttatgaaccatatcggcttcatccagcacaagtccgataacggtatgaccgccctcgtggtacgccacgatattgcgttcttttttcgatatgacgcggctcttcttcgcaggacccgcaatgacacggtccgttgcttcatcaatgtcgcgcatatcaattttcttcttgttttgacgggcagcaacgagtgccgcttcgttaagaaggttttctaaatctgcgcctgagaaaccgggtgttcttgaagcgattgcttttaagttcaccgtttcatcaagcggtttgtttctcgcatgcacctgtaatacggcttcacggccgatgacatccggacggtctaccgtaatctgacggtcaaaacgtcccggacggagcaatgcagggtcaagaatgtccgcacggtttgtcgcagcgataataatgattccttcattcgcactgaaaccgtccatctcaacaagcagctggttcagcgtctgttcgcgttcatcatgcccgccgccaagacctgcgccgcgctgacgtcccaccgcgtcgatctcatcaatgaagatcagacaaggtgcattctttttcgcattttcgaataaatcacgcacacgggaagcaccgacaccgacaaacatttcaacgaagtcagatccgctgatgctgaagaaaggaacgcccgcttcaccggctgaggctctcgcaagcagcgtcttaccggttcccggaggtccgactaacagcacgcctttagggattcgggcgccaagctcggcgaatttgcgaggatctttcagaaactcaacaacctcaacaagctcctgcttctcctcatccgcgccggctacatctttaaacttcacgcgtttcttttcttccgtatacagcttcgctttgctctttccgaagttcatgacacggctgccgccgccctgagcctgattgagcaggaagaaaaacagaataaagatgatgacaaacggaatgatcgtcgttaagaacgtcacccacccgcttgtttcctgtgcgggatcaacttttacgtccgtctttttaattgcgtcaaatatctggtctgctccttttccttcaggaacatgtgttaaaaagtactggtctttgtcgtattttttcagctgtccttttacctcataaacacctctgacaggctgaaccgatacgctatcaactttcccttcatcgaggttcttgataaacgtactgtacgacatattttctgtcttcgggtttgaagtctggaagtaacttacaaccccgattactactaataaaataagtaaataaaaaatggtattacggaagacccgattcattccttacctcctcccacagtaagcacaactatgttcaatagtaccatagaaaatcattccaatacaaccgataaccatctcggaagcaggcagccgatcagctttcataaatcgccggttttagtactccgatgtaaggcagattgcgatagcgttcggcataatcaagtccgtaacccacaacaaacgcgtcaggaacttcaaagcctacgaagtctgctttaatgtccgcttttcttccgcttggtttatccaacagggtaacaatcttaattgatttcgctttacgatatcggaagagttctacgagatagctcaaggttaacccactgtcgataatatcttcaatgattaagatgtcccggccttctacagatgtatccaaatctttgatgattttgacttctccggaagaaaccgtggaatttccgtagcttgatacatccatgaagtccatttccaaatatgtatcaatatgctttataagatcagccataaaaggaagcgctccctttaacacaccgattgccaacggaaacgtgtcgctgtactcgcttgttaattgttctccaagctgttttactttctgctggatctcatcttctgagatcagcactttttcgatatcctgtttcatgttaatgcttgccccctacacttttcatgctgtctatattgtaatacaatgcggtcactgtttgaaatcacaagatcgtcaaagatggattttttcaagccaggcagccagataatttcaccgctcgcatccgttacaatcggccattcgtcccgatcccgcagaggcagtttatgatcaataaatatatctttcacctttttcgagccattcatccctttaagtttgatccggtcaccgatttttctcgtccggattgttaaaggaaattgcaccttgtttctgcttgtcataaaaacagcattcccatttttgatatgagggtcagcctgatcggccacctctatcataaagccgttggggagaacagcagtctcgccttccgctccttgcagctgcagctcaaagggaattttttcacattgccattgttcaaatgtaaacaaacatgtctgatatgatttgaccaccttcagccctttcggaaaatcaagcactcccgaggcgcttccattttccgcccattcgagaaactgctgtatgtggcgggcggaaaacgacgatggaacgttttcataaagatagtttaatattagttgaactcctcttctttgtaaaggtatcggaagggcaagcaattgagaggaattgacttcaaccgatgtgtcagacttgcttgtaataaccttattcattcgttctttcgttaatgactgcaggtattgttcgtcttctgtcagtgcttcactcaccttttgaaacattttatgaacgtcaggtgattcatgttttaaaaaaggaagcacggtctttctgaatctgtttcttgtataatcgtcttttgcattgctctcatccgttctgtagctgagcccttcttgacggcagtattcaaggatttcatcctttgccgcaaagaggaaaggcctgatcagccagccggatgcaaattcgcggacgggctgcattcccgcaagccctgccccgagcgtacctttcgcaagcctcatgagcattgtctcaacctggtcatcgccatgatgagccagcgccaaaaacttcgcttggtgttttgtcatcagatcttcgaaaaactgatatctgcaatcacgcgcggcagcctgcttgttcagcttattcttctttgcgtatgcagaaacatcaatctgtaccgtttcgcagaggatatgttccgcttcgcaatatgactgcacaaacttcatatcttcttcagattcaggacccctgaactgatggtcgacatgcgccgctatgataacggaagaatgcccaaagtgcttattcagcatactgagaagcgccattgaatcagggcctccggagaccccggcaataatcgtttctccctccgcctgaagatgatatgttttgaaaaaatcttccacgcttttcacaatgtccccctcacaatgagcaggttttttaaagatatacatatcctatcactttcattccctccaagcaaagaagaagcatgagcgcaggcgtccggccggcactagataagaaaaaagacgatgtaagcgaaataaagggcgagaacgctgattaaaataagtgttgtttcaaacaaaccattgtgctttgcgggtttttgtttaggtttataccgcgtttgagatacagtgccctgccgcggttttgattgcggcggcttaggcttggcggcggctttccttttgctcccggcactctgccccgccgtcaggatgtcatgcttcatggcttccgcagacggatattggccgtttaaagcagaaaacagaaccttcttatacttattcagaaacgggtggccttcaatgatagaacgaagctgttctttcggctgtcctgactttttgcactctttcttctggacacagtggatcatgatcattgcgacagcaaacaggtcataggagggttctgcttttcttgttccatacccccaatagcccctgtcgtaaaactccgtatactctttaatcgcgcggccctgttttgtcgttccccctacatcaatgcagcgaatggcagccggtggtccggttacaatgagattgtccggtttgaggtcgccaaaaacccatccttgctgatgaaggactgacaggctggaaagaagctgcaccatcagcaccggaatccactccgctcccttactgctgatatattgcggaagaagcggcccttctatgtactccatcacgtaaaaagggacatttttattcagctgcggaataaacgcgtcgtccgcatcaaaaaaagaaggccccatcgtttgcgaccgggcctttgaaaaggattttaagacattcacttcagaggtaacagacatgctgtcgctgcttatcttcaaagcgacctgtccgcctgatgcttctgccagatatacaataccgttagccccttttccaagctgtttgagcaatctgtaggatttgccgttccatttgccctgaattgccgtccccggtgccagactacatgccaaactcgttaaagcgtcgttcatcatctgccaacatgctccttcttgagcggattctctcaaactgctgcgtcgcttcccggatagcggggcccgtaggggtgataccgccggtcgacagcttcgcaaagagtgcagaaagggattcaagcttcggcgtccaattcagcacaagctcaacttcctggcttttcccgggaaatatacacattgcaaattcattttgcccggcccgggaatttaaactgatggaaagatcgatcagcgcttctttcaccgtcggcagtttcggcgccatactcgcactcgtatcaaccagcacaagcacttgcagatgaaccgtttcgccgagttcatcaaccacttccatcacttctccgcgtttttcaggagaaagctcttccatttcaacgtttttccctaagatttgtttaagctcttgattgacgacaccttgcagcgtctgggtcattgcttttttcgtcaccatttgaaccgtctgagacaattgtgacgcatacacaacttgatggacgccgcctccggccatggcgatgccttcaacttccttcattgcttcttggtcaatcgcgttttcttccataattcctataacattcaccgtaatcccctgctccttggcgaaagccgccattgcgatcgggtcttcaccatgattggagcagccatctgtaatcagcagaacttgatttaaatgtcccttattcacatacattcctcccggtgatacgattagtcccatcttcgccagaaggaaagtgatttatacgaatggattaagaaatctcctttttattttggaaaaccgccggcaccggtatggaagcccatttcggcgtgttgtgatcaatccggacaacaaccactgtcatatcgtcttcgatttggccggatcgtgttctgatgacctcttccattaatatatcagcgatttcctgcggatcttcggttttcagccctttcattttccgcttcatccacaggtcgtggttttcaacgtgcttcggcccttcaaaaataccgtcactcatcatgacgagcagatctcccgcttttaactgttcacttacaacctccacatcaaattcattgatgatgccgatcggcagattgctggcctgcactttcatgacttgatctccccgcttgataaaactcggcgttgaaccgaccttcaagaatttgcagcttgcatcctgaagatcaatgatagaaagatcgagagttgagtagatttcgtctgtcgtccgtaaagacagaatactgttgatcgttttgatcgctattttttcatcaatacctgattcgagaattttttcgagcagcttaatcgtttcattgctctcataatgggccctcgccccattgcccatgccgtcactgatcgcggccgcatattttctcgcccccagttccatcatgctgtagctgtcgccggagacaaggccgccgccttttgccgcatgagccgcgcctgtcgatacccggtatgacttcgtcgaaccgaacgcaacatggctgtagccattcggatgagtcgagtgctgttcgcttttgacaagtatctgctcctcaagaatgtcagacagcatcggggcgataattttctcactctcgccgtgtcctccgctgaacgggattgtcatttcgatatcaatattgccctgctccaagctgtatatctcgacatgctgaatctcgattccgaaatgctgaagcgcctctatcatttgttcttcctgaataaaatgctgctccctctcccgttttatttcccgagaaaagtccgccatgacctcagaaacccccaacagctgctcggcaacaagccttctgctgtcctgaacttttctcttcagtgtcagatgggcgtgatggtgggcaagttcgtcctcaatcagctcttccacctgtctggatttggaacagtgctgttgaaactccttttttaatctgcggtttgaggcatactgtttttcttctgtttcatgcataacttgtttcattaagtcatatgttttatcaaagttttgaacccagcatttacttttcttatagcaggattggcaggaatgctcggtgattttgcttaaaaagagatccacttccccttcttccgcctgctcatcggaagacgtctgatgaaaggtggcgaagctctccgacaaggcatgaaacacattggagaactggtctactttctgggcggtgacatctctgattttcctcgcgtactgctgctgttcctgactatgctcagcagtgcccggtatgtatcgcgccacctttttcgtaatcgattggggcgtaatcaaaaacaaaacaacggcaatcaaagattcataaagagtggtcattaatccggcagacccttctccatataatgaaatcagcagtgagccgatcactaacccgactgcggctccagctttctttccttctttcagcagcccgccaagaagcccggaaaacgcaagcagactcatttgatagagattcccgatattcgcaagcccgaggatcagtccggtcaccacaccgaccgtacagccgatgcttgccccgccgacaaaggaaaaactcagcacgacatagcgggccaggatatgttcagcctgcattccctgaaatgaaacaccggcaagcccggttaaaacggatgcgatcaagatcataaaacagatgatttcttctatttttaacgattgcttcacttttttgatcgtgaagatcggcaggctttgcaaaaagatcagcgtcaaaataaaggccaggcccgcctcgacaacagccatcacataatcataggtggtaaaagcgccgctctcaaaataaacaaatccgattctcgccgcagccatagagaaaaacaccacgatcggcagcatcttcacccggtcctgcacgatatatgtaccgatttttgaaaatagagtgaagacggccaaagctgtgagaatcaataaagagtgtttcggcgaaatggttaaagcgcccgcaagtaaagacagacaagcatagaaggctttatctcttctgatcaaaagcatcgctccgaaaaacggcagcgcaaacggaagaacctcagataatatgaaagcccgtccaagtaaaaaaccgatcacaacataaatgaaacccttatagaaaaaaagtgaatgcgcttgatggactgtaagctttgccgccttttcaaaaaacgattgcagtttttccaaagcttgtcccgccatcggcccgttcactcttctttccgctttttccattgctctcatcccccacctgttttattcgttgcttgtcattataaatgaaagcccagataggattttgtcaaaagaaggtaacaattccaaagaactcttcgacgctttctcccttgttcccctttcctttcgtatttcctacgacatttctcaaaaagttgtctaaatatgaaaaaatcggcttctgcaacagaagccgattcgcttgatgacccgtacgggattcgaacccgtgttaccgccgtgaaagggcggtgtcttaaccgcttgaccaacgggccagatatatatggtagcggcggaggggatcgaacccccgacctcacgggtatgaaccgtacgctctagccagctgagctacaccgccatataaggtgcttataagcacaagttatataatacaaaggtttcttcattccgtcaacagaaactttgaagttttaattttctgactataatgacacatacaaaaaaagcacccgctgggatagacggatgctccatgtatttatagaaagcagcaagttatcctcttcttgctccgcgccctccacgttttgattccgtgtttcgttttaaagatgataagcggtcttcgctatctttaagaaacttgttcattttctgttcaaaagattctttcggacggaaatcatttctaggtctggcttgcggacggtctttagcttttttaattgataaaccaattttcccgtctttttcaacgttgatgactttcacttcaacttgatcgccgacttttaaatgctcgttaatgtctttaacataattatcggctacctcactgatatgaacgagaccggttgagcctccaggcaattcaacaaatgctccgaaatttgtaatacctgttattttcccttgcaacttgctgccaacttcaatcgacataaaaaaagtgctcctccttaggcttataaaaagatcgtttgtttaattatacctaaataaaaatttaagtgtcaacaaggctacttgctcttcttttctacattgaagagtatctcaccatttcctgacataaacaagtctcttctggcaagctctgtgacgtaatcctcatcctttaatttggaaatttcatcttttaaatcagcctgtttcgcgttcaattctttcacttgtttttccagctgagctttcttttcttcgtttgcgctaagggaagaggtctgtgaccacagagaacccgctaagacaatagccgtcaacaacacaagggcgccgaatacgatcaaccgtctgaaaagccctttccgccttcttttcataagctgggattgccgttcaacctgctctttatagtcgttttggatttcagttattgtacgttctctagatagattcaaaccagacggtcctcctttcaccttttcaaaatacgtatcatggtcgatctgattgttatgattagtttcttgctcttttgtaaaaatcctgcacttttttgaaaatatcgtttgaaagtaagacgccacttttcaggaagaagtttcaataattgtttcaacaggaaaaacagcggatacagcaaaaacgttacgatcttaaaaagacacttcgcaaaaaaggcactcacccgataggagtataaagaaacaaccgtgatcagcccgatgagcagcttaaagagcagaagcaccggacgaaacagcacgtgctgaatgagcttttttgcgaattggtaaagagacaccgcaagatgaatggcgaatttcaatatttttatatacattcgtttaaacaggctttggtacgtcgcaatccccagtaagacagccaagaaaatgtataccctgagttctccttcattcacgttgagcagcacatagaaaaacagcagaccttgtacaatccaaaagagaatgtcatgaatgaataacagccatctggccgttttggcgcggctgacaaacagcctgtatgtatcaagcgacgctccgagccaggcgcccataccggtcattgccagcatcgtataaaattgggtggtcagcgtcatttaaacaacttgctaaaaaaccctttagctttatccccttgctgctcgtctaaatatacaaggtcgaacaccctgccttttatagatacaatccctttttccacatcaagatttttcatctgcaggttctcgcctctgacggaaagcattcccataaccgtttccagcaaaaactcttcgttgtcaaaactttctacatgcttgacgcccgaaatgtctaaatgctttctccctttcatcgttacatcatgctgttccggaacagaagaagaacctttttgctcataatatgaattcatctattcagcccccatatcctcgatacttttagcattattactgcattgtatgaggcgggagccttgtttagaacaagcctattcgccgagtttttcttccttgacgattgtatacatgcccgcggcttcttcttttttcgttgtttctttcaattcgtttaccttcacggtgacaagcttctggccgaagcggaccgtcagttcatcaccggcttttacgtctgagctggctttcgcctgattcccgttaacggtgattctcccctggtcggcgacctctttcgccaatgtgcggcgtttaattaatctggatacttttaaaaacttatcaagtctcatatcagaatctcctctccatttcttttgcttcatcccacaatttgtccatttcctcaagtgacattgcggtcaattcaagtccctttgctgccgcttctttctcaatataagcaaagcgtctgcggaatttgtcatttgtcatggcgagcgcttcctcaggctcaattttatagtatcggccgatattgaccaatgcaaataaaacatcgccgaattcagcttttaagctgatttcatctgctgattcggcggaagcctctgcagaaaattccttcagctcttcatttactttatcccatatatcctgaacgtcatcccagtcaaagccggtttttgcggcttttttctgaagcttggccgcttttgcaagagaaggcagtgttttcggcacggcatccagcaatgaagtggatgttgtttgcttttccgcctttttgatttcttcccagttggcgacgacatcatgtgcatcctgaaccttaacatccttaaacacgtgcgggtgccgtctgaccatcttcgcactgatgtctctgatgacatcatcaattgagaaatacccctcgtcttctccgatctgggcgtgcagcataacctgaagcatgacgtccccgagttcttctatcatgtgatccgtgtcctcttcgtcaatggcctcaagcagttcgtagcattcctcaatcatatatttctttaatgactggtgtgtctgcttttgatcccacggacagccgttcggcccgcgaagctcgcgaataatacttcggaatgcagaaaattcctggtaaaggagttcttcttttttaatcggcggaacatacacgcttgttaagttatttatttctacattgcggtcaagttcaaacaaaggcaccttggtcattttttctcccttgcttccggctgccgtgacgatgaccacttcatagtcgtcaggcaatttctccataagcgtcagcttcacctcagaggccgtcatttggtcataaacctggcaaatgatcaggtgatgccggagttcgagctcatccggcgtcattgtttgcgcatccgtaaattgaaacccttcaatcggatcaattcgcaatgcattaaaagtggcatccaaaaagctttgccctccggcagtatgaacagctgcctgttgttcttcccggcgttcaaataacagctgaacggttttctcagcgacaaacggatgcccgggcacagcgtagacgacatcctcttgcttcgctttttcaaacagaatgtccgcgatctcttcatagaccgcttcaaactgatcatgtttttcataaatatcatcaaaataccggatgtccgcttccgtctcttgctctaattccggaatcaaagggtggtctttcgttcttatatataaatgcttcgcctgagtcagcagcttatgtacgcccactgtcaactgatccatgtctccggcgccgagaccgacgaccgtaatgttacctgccatgtttttctctcctctttttcaatttgcttaaagcactgccgaaaggaaggccgctcagctcttcgtccgtgaaaatcttcattcttatcatacaataaataaacaatagccctccgatgaccgacgcagacagactctcacatacagctccggccctgctgacaggaacaaataactgccatagcttcatatatacgagcagaaagaagaccatcagcagactgcaccagcacagacgggcaatcacgccgctgatattcgtcagccagcccttcgaccaaattctccggagattcaggcacgcaactgcggcaaatgccaagacggtcgccagtgccgctcctgtaataccccagccggggaccagccaaacattcagcacccatttcagcgcccctcccgccaaaacggatacggcggggaaaacggtatgtcccgctccttgcagaatcgcggctgccgtaagcgcaatcgaggcaaaaaagatagataagctgaatatttgtaaggtctgcgtcccctcactgttttggaaaagcatgatattcaccggctctaaaatgcaaaaaagcccggctgatgcaccgatccctaccgcaaggcagagcttgacggctgatgtcgctttctcttttatgataaacggcttattctcatgcaccgcttttgaaattgaaggaaccaatgacgcggcgatactgacggcaaacacggttcccagctgaaggagcggctgtccgcggtcatatatgcctttcagctgtttcgcggcatggctctccgtcccgtctgaaagcagtgaatataagtttaaggcgtctacaagctgaatcaaaagcatgagtacactgctgatacagatggtgactgaataaagcagcagcttttttacaatgacggccgtttcgatatgtccgccgtctttcttggtttcttcccgcttataccagaaaacagccaatacacaaagggccgccaagcttccggcaattgatcccgaggccgcccccgcaccagccgcgtataatgaacggccgcttttcaaaagccagaaggataaaccgagaagcaccgccacgcgaagaagctgttccgtaatctgggataaggctgacggcatcatatcatgcacgccttggaaatacccccggaaaaccgccgtaaacggaaacagtatgaaagcgaacgccgcgacccttatcagcatcacaaggcggtcgtcacccataaaaccggccaacggcgccgcgccggcatacatgagcgcaaacagaacaagtccggccgccgtgacataaagggcggaaattttcattattttttgtttatgatcgctataatcgttcattaattttgagatgattaccggaaaaccggatgttgacagcatgaccgcgatccctaaaaacggatacacctgctgataaatgtaaaatccgacgtcaccgacaatattctgaaaaggaaccctgtacacggcgcttaatatcttcgttacgatacccgcaacgacgagcacaaaagcacctttccatgccgattgccgcttggcgccaactgaatcgttcatccacaagctccttccagccgctagaaaattacgtctataaaacgagcttattatatcacaatcctaacggccgaaccgatagagagcacatatgaatatgaaaaagaacagcacttgtataagagctgctctttctccgttttcttatttcaataatggtaataagacctactgctccatttgtctcgccaaaaaactggctgccgtttctaccgctttatgttctacttctccaagtgcctgttccttggaaaagatgaccacggcaccgataggatcgccatttgccacgatcggagctattgtataggagctcatatcttcatcaatgtcattaacaagctgcgcggacttcacgtcgttttctaccactgagctgcgctgatccatcgttttttcgagcaaatcgctgatggctttgttcagaaattctttttttgaactgcctgaaacggcaatatacgcgtcacggtcgcaaatcaagacggaatggccgagactgtcatacaaagcatctgcatattccttcgcaaaatcgccaagctcactgataggagaatactttttcaatataacttctccgtcgcggtcaacgaatatttcaagcgggtctccttccctgattcgcagtgttctccgaatttctttaggaatgacgacccgtcctagatcatcaatacgacgtacgatacctgtagctttcatctctctggtgcctctctttcatgtgatgatatttaagggaaagtactaaagctctttactttatgtagcttccgccactcgcttgaaattagtatccgtcacatcaaatgtaatatacaccagagagtaacaatttttatgaagacgcgattgtttctttcttcacatcctgaaggcctttcagcatgccgagcacggtttccagccactcttccgttttgcggcctttcgtctgtactgagattttcagctttttcccttccattcccagtccgatctgccggccgtatttattgccgagttcgaacaatttctggccgtcaatctgtgcgctggcctcttcagaaatggtaaatctgatcgcgtctttatcctgcttgatgagttcgacgcgttcatattttccgtataccttcatctcagcaaccgtaaacagccattcaacctctttagggtagctgccgaacctgtcgatgatttcatcttgaagctcatttttctcctcaattgtggcgattgacctgaaccgtttgtacatgtcgattttttgcttgccgtcttgtatatagttttcaggaatatacgcgtcaagctcgatatcgatttctgtctcaaactgttcgcttttcggaatatcgcctttccgctcttcaatcgcttccttgagcatttgcgagtacaggtcaaaaccgactgagtcgataaagccgtgctgctgcgcgccgagaaggttccccgctcccctgatcgtcaagtcacgcatggcgattttaaagcctgatcccagctcggtaaattctttaatcgcctgcagccgtttttccgccacctcagtgagcactttgtctctgcggtacgtaaaatacgcataagcaacgcggttggaacggccgacccgtcctctcagctgatacagctgagacagccccattttgtctccgtcgaacacaatcaaggtattgacatttggtatatctacgcctgtctcaataatggtcgtgctgacaaggacgtctgattccccttccagaaaattgagcatgacgctttccaattcattttcggtcatttttccgtgggcatatgccactttcgcatcgggaacaagcatggaaatttcatcagccttccgctcgatgtcatccacgcggttgtacaagaaatatacctgtcctccgcgcgccagttctctttcgatggcttcccgcacaagcgcgccgttgtattccacgacatatgtctgaacagggaaacggttttccggcggcgtttcaataacagataagtcccgcacaccgagcatggacatatgaagcgtacgcggtatcggcgtcgctgtaagagtcagcacatcgacattggctttgatctgtttgattttttccttatgcgttacgccgaagcgctgctcttcatcaatgatgagcaagccgagatctttatagacgacgtctttagataagagcctgtgggttccgattacgatgtctaccgttccgtttttcaggcctttaatcgtttcattggattcttttctcgttctgaatcggctgagaagaccgatgttaatcggatagtcctggaaacgctccataatggtttcataatgctgctgcgcgagtattgtcgtcggcacaagaagcgcgacctgctttccgtctgcgatcgctttaaaggccgcccggatggctacctccgtcttcccgtaaccgacatcaccgcaaagcaaacggtccatcgggcgctctctttccatgtcctttttaatctcctgaatggaacggagctggtcctctgtttcctgataagggaaagcagattcgaactgccgctgcatttcatgatccggcgagaacgcatagcctttgcttgcttcccgttccgcataaagcttaatcagatcatcggcaatatcctgaacggagttttcaacttttttcttcacccgtttccattcactgccgcccagtttataaagcttcggttcttttccttcagagccgacgtacttctgcacctggtcgatttgttctacagggacgtacagcttatcgctgccctgataatgaatgttgaggtaatctttatgaatgcctttgatttctagtgtttcgatccccaaatacttaccgatcccgtggttgacgtgaacgacatagtcaccgacctgaagctcggaatagcttttgatccgttcggcatttgtcagcttctgctttctcggctttttcttgattcggtttttgaacagctcttcctccgtaatgacggccagcttcatcagcggcagttcaaaaccggattgcagctcgccttccatgacatagacctgtccttgcacaagcgctttggagctgtccgtttttgcggcttcaatttcgtaatcagccagcacggatgccaatctgtcggttctgtccttatttgcgcctaaaaagacgacagtgaagtttgatttcttaaagcgctccatttcacctgcgagcacattcatctgcccgtgaaaactctgcatctgccggcttgtcacattcacgatattctgagggcttgtatgctggacatgacgcaaaaataatgaataataaatagccgggcgccgcttttcgctcataagctcctgaaagctgaaggataaatgaatgtcatgcagaattttcccttcctcgagcagacttgtcataaattcggcctcttctttttgcagctgatcctccatttcatgaatgcggctgacctcgtctaacagtaacaacgtgtctgccggtgtataatctagcaaactagcaggtttttcgtaaaagtacgagagatacttcacaagttcctgatcagtctgtcccgttgataaccgttctttatcatgtgagatattgatatgaagcatttccttttgtttgtcctgcttcagctttttcagactgtcggccagccctttatcgagcctttccattgcccgggctttttcttccgccctgatgatcaattccttcgccggtccgatcgccacatgtttgagcgtctcaattgatctctggtcatcagaattgaagcttctgatggaatcgacctccgtatcaaacagttcaattcgcaccggatgctccgacgtcagcggataaatgtcgataattccgccgcgaatactgaattcaccgggtgcagaaaccatatcggaacgctcataccccacctctacaaggcgcgcggacagctgatccggttctatatcgtctccgagtgaaatgacgagctggctgcttttccacagctccttcggcggaagcattcttctcactgccgcaacgggcgccacaacgaccggcgcttctccgtttgttaatctattaatgacatcaagccgctgagcgcgcagttcaggactcgctaccgcaatttctgaagaaatcaattcattcacggggtataaaaaaacagattgatccccgagaagcgccgtcagatcttccgtcactttttgggcctgatataaattatgggtgataaagaaaatcggccttttcgtttcctgtgcaagggcggaggtaaaaacagaacgcgcggaacctgacagacccgcaagcagctgttccttcagcccctcatgtaaaccgttgacaatggatttaaaatcatcgctttctttaataaaggtttgaatgttgtccatatgggccctcctctctattttctgcaagaacagaaaaacgctttggtctagaatctacaccaaagcttcttattgaataaatgtgttgtgttcatggtagtgcggattgcgctccagcgcctcttggcagtcttcacaaattgtaagaacatggacatctccattgtctttatatgaaatcatatcgtttctttcctcatttgttaagtgctgaaatccaagtgactgtgtcggcaccgtcgaatattccaggctccctaccttaaagccgcagtggcggcagaaataatgcaaagccatacgttggacctcctgatgtgaaaaaatcatttttccctagtatggtctcccattatttatcttatacatttgcattaaattcgttcatgacttctaaaaaaggtttcgttaaggaagcttcgcaggcttttacggtttttgagacggcatcattgatatgcggcgcttcttccttcgtaaaagctcccagtacatagtcaacgactttcattccgttgacggggcggccgattccgattctgacccggtcaaattcaggggttccgaggtgctgtataagcgatttaattccgttatgtccgcctgcgctccctttcgtccggagcctgatttttcccgtcggaagatcaaggtcatcgtatatgactttcagatcttcatgatcggcatcataataatccagtagcggccgcaaacattcccctgataaattcatatatgtaagcggtttaacaagtagaactttttttccggaaacaaaccccattccgtaaagtccgttgaatttcgttttattcagttcaatattccattctttagaaagctcgtcaatggccataaagccgacattatgtctcgtgttctcataggttttcccggggttaccgagaccggcaatcacaagcatcgtaaatcctccctcaacatcgctgtaattcttctcattctagcacaaaagacgtaacctcgggcgggttacgtcttaaagcgcttattgattttctccttcgggctcttccccaggagacggttctgcatcttcttcgaatgcttcctgcttaggaggaaggatggaagccacgacttcttccggatcgtttgtaaatgtataattgccgtcagcagtcagatctgcgatggtcagcacatcattcatctcaagccctgaaatatcaacattgattgtctgagggatgtccttcggtctggccttaatcgaaagctcatgcagcggctgctggatgacgcctccgtctttgactcccttcgcctctcccgtcagctgaatcggcacctcggcctccagctcctcactcatattcacgacttgaaaatcggcgtgcgtcaattcgtttttgagcgggtctgtctgaagatcagtcaccataaccgattgctgatttccgttgacatcaattgtgataatcgtgttttttccttcgtcccgcaatgttttaagcaattcgacactgtctaaagagacaggcgtattcgttgtttctttaccgtatataatccctggaacatgtcctgaatgacggattttccgaagcgtcgaacgtttaaaatctgttctttcatttgcttttaaagttgccatattcagcaccatcctaattatcgttttatcgtcctattagaacaatacccacaataactgggatttaaaccttaaagtttcggtttagctgaataaatagctgacagattgtttctcgtgaacgcggataatcgcttcagccagaagcggtccgacagaaagctgcttaaagcgttcgatttttttctcatcaggaagcttaatgctgttcgttacgacaagctccttgattttagagttattgatccgctcaacggcagggcctgacagtacagggtgcgtacagcatgcatacacttctgcagctccgttttcaaccagcgcgttagcggcaagtgtgattgtgccggccgtatcaataatatcatcgatcagaatcgctgttttaccttccacgttaccgacgatgttcatcacttctacctcattcggtctaggacggcgtttgtcgataatcgcgatcggcgctttcagacggtccgcaagtttgcgggcgcgcgtcacaccgccgtggtcaggagaaacaataacgatatctttcaagtctttaccttcaaagtaatggcctaaaatcggaacacccattaagtggtcaatcggaatatcaaagaaaccttgaatttgcggcgcgtgtaaatcaagcgcgatcacgcgtgtcgcacccgctgtttcaagcaggtttgcaaaaagttttgccgtaatcggttcacgtgatcttgcttttctgtcctggcgcgcataaccgtagtacggaatgacaatgttgattgttttcgcggaagcgcgctttaaagcgtcaaccataatcagcaattccatgatgtgctcgttgaccggcgcacttgtagactgaatgatatagcaatcacagccgcgaatactttcttctatgttgatctggacctctccgtcactgaatcttgtaacagagcactttcctaattgaacccctacattatccgcgatttcttttgcaagttctggatttgaattcaaagaaaaaatctttaaattcttatctccgtattcgttagacatggtaaacctccgattttaggattattttttatgaatgtttttcacataatcttctttatttacttgtcttgctctggcaatggcaagcgcttcgcccggcacatcttcagttacggttgaacccgcagcgacgtacgcgccttctcccactgtaacaggagcgaccagattggagttgcagccaataaaggcgccgtcttcaattttggttaaatactttttcttcccatcataattgaccgtgatggagccgcagcccagattcacatccgtgcccacttcggcatcaccgatatagcttaaatgagatgctttgcttcggtcgccgaattgtgttttcttgatttcaacaaagtttccgatcttcacttcattgccgattgcggaatcgggtctgatgtgagcaaaaggaccgatatttacatcattcccaactttgctgcgattgacaacggattgtttaatcacagtgcggctgccgattgagctgtcctctatctcagtgtgagggccgatgacacattcatcgccgatttcagcttgtccctttaacacagttccgggataaataactgtatcttgtccgatacgtgcgtcaggtgagatgtacgtattcatcggatcgattaaagtgactccgttctgcatatgccgtttgttaatacgctctttcatatacatttcagcctgagaaagagcgactctatcattcactccgagcgtctcttggaagttaccagtctggtaagcggcaacagtttcgccttcgtctttgaggatttcgatcacatccggcagataatactcaccttgggcattttcattcgaaacctgttcgatgacacgaaaaagagcctcgttatcaaaacagtacgttcccgtgttaatttctttcacaagacgttcttgctccgaagcatccttgtgctccacgattttttgaacggcgccgtcttcactgcggatgattcttccgtatccggcgggatcgtcggcaacggccgttaacaccgtggcttttgcacctttgtctgtatgttcattcagcatggcttccatcgtctccgccgtcagaagcggtgtatcgccgcaaataacgatcgtgacacccttttctccgtgaagaaatggttttgcctgtttgaccgcatgagccgtaccgagctgttctgcttggagagcgtaatcgcttttctgtccgagctgcttcttcacatcttcggcgccgtgtcctacgatggtgacaagcttcgctaaagataatttcagagcttcgtctgcgacgtgctctaccataggctttccgcataccggatgaaggaccttgtaaagcttcgatttcattctcgttccttttccggcagctaaaatcactgcaaaccgcttatccatttaatggcctccaatatcccttttatccatagaaaaatatatcctaaatagctgttgatttcaagaagacatcaaaaagtgcaagaattttctatgtaatcgctttattactgaaaaatcagatttaaaaaaggactgccggaaaaggccttgtgtcagcctttatcagcagtccttacattttgttatgtttaagaagccccggcttcttcatattctaatgcttcagaatcacccaaacgatgatactcatttaaaacagcatcctggatcttgccccgcgtgctggaattaataggatgagcaatatcgcggaattctccatcaggggtgcgtttactcggcatcgcaacgaaaagaccattgtttccatcaatcacacgaatatcatgtacgacaaattcgtgatccagcgtgatggatgcaatcgctctcatgcgaccatcggtattcacgcggcgtaatcttacgtcagtaacttccacagtagttcaccaccttttccctatataaaagcattagtctaacaattccacgattctttttaaattcctgcacgtttcaaaaagtttttttgaaaatataggatatacatacacaattaggtgataaaccatatttggggatcatatactgcataaaaaaagtgatcccgaataccggaaccacttttctgagatttaagatttcaccagcgcaatgacttcaatttccacgagagcgtctttcggcagtctcgccacttccacacaagaccttgccggcttatgtacatcaaagtattgtccgtacacttcattcacttccgcaaactgctccatatcagcaataaacaccgttgctttgacaaccgtctcgagagaagcgcccgcttctttcagcacagcttttaaattgctgaacacctgatgcgtttgttctgtgatatcaccgtttaccatttctccttcagcagtaagaggaatctggcctgagctgtaaaacatgttgtttacgatgattccttgtgaatatggcccgatcgctgccggcgcgtgttttgtatggattgcttttgtcatttttctgtctccccattctttacatgctgttctttaaaaaatcgcagaaaattgccgttttgaatctcaatcgttttgtctttcatattgatggttgaaagcgtgagcagtgacatgtattcatcgacaagccgttcattcactccctcggcttcaaccaagacgcctattcccgcaacgtttgcattaaactcatcaagcaggctgatcatgccgttaatggtgccgccggctttcataaaatcgtcaataatcaaaacgttcgatcccgtagccaaacttcttttcgcaagcgacatcgtttgaatgcggttagacgaccctgatacataattgatgctcaccgtggagccttccgtcactttattgtcttttcgcacgatgacaaccggaacgttcagataactggccgctgcgtaagcaagagggattccttttgtcgcaacggtcatcaccacatcaatctcccgctccgcaaaaacggaagcaaaaagcctgcctacatgagagaggacagatggttttcctaagatatccgttaaatatacataaccgcccggaaggatacgctcaggatttactaaagactgtcccagctcctgtataaacgcttctgcttcagcctgtttcacttttggaatgtatttgacgcctccggcagctcccggcactgtaagcagcgtcccaatgccttgctgttcaaaggtctgtttaataatcgttaaatcttcactgattgatgactttgctgattgataccgttctgagaaaaacgttaacggtattaattcatgcggatgggttaacaaataatttgttaagtccaccaatctgccgctgcgacgaaacttcatgaacttacccccaaaatccgaataatttaaaaataatataacttaacatacggatttaatcaagagcattctgttcgccgatcatccgcactgcgtacacttgatcacagaaacctcttaacccgttataaatccgctgcaccttcgattcgtattgaaccaaaccgaatacagtcggtccgcttccgctcattaacaccgcatcagcgccgaagcgtttcatttgatttttaatcatcgccacctcgggatggaggctgagcgtaaccgactccaatacgtttcctaattgtccgcataccttttggaagcttttttcttcaatcgcgtcaatcatcgtctgcacatcaggatgccgaacctgctgtaagttcagccggcggtacacttcggcagtcgataccccgatcgtcggtttggcgagcacgacccagcaatgaggcggagcactgatgtgcctgatcttctcaccgcgtccggttgccagagcagtgcccccgtatacacagaaggacacgtctgagccgatttcagccccaagctccgcgagctcttcgacagaaagctttaaatcccaaagcctgttcagccctctgagcgtggctgccgcatcgctgcttccgccggcaagccctgccgctacagggatcacttttgtaatcataatggaaacgccttttttgacttgaaaccgttctttaagcagtttggctgcctgataagccagattcctttgatcatccggaacaaagcgattatgcgacgccactctgataacgttttcgggcagttctgtcagttcaatccgatctgccaaatcaattgtcgtcatgatcatctccacttcgtgataaccatccgggcgtttactcgtcacatcgagggacagattgattttggccggcgctttttctaaaatacgcatagctttcacctacttctccatctaaacataagtatgaacattgtatcacatttggagacccggaggtacttatccgaaattgacgccggttttgaatgccgatagaaaaaaccggggaacggattgtcccccgggccactgcattatcggttattttggttctgagccgccatctgctgttcggcaatctcaatcgcgcgctttaccatattcccggcgtcacgcgcccgaatgcctccccagccctcgtttttcaccgtatcgtaaaaaccaaggtccttcgccagctcatatttgaactcatctgacataactccacgacgtctgcccaaacgaaacaaccccttttatagaattgatcaccattcgtgcacgccacgataaaacatgtgacacttatagcttccgtttaatcggccgaaactttcgagggaataattagaagagctttagaaggcaaaacaaaaagcagtaaacaaaaggttcactgcccattaaaatgctactgagcttgccgcatcgtcattgaatgtcaattcaacagtctcagtcagaatatcagcataactgtatgaaactctttcaaacgaattctcgtcttgatctagttgtatcacaaaaacagaagggtacgtctcagctaaaatgcccgaacgctcaatcgtttttcggcggccgccgtttgcttttaacgtaagccgtttacctaaattcccatcaagcgatctttttatatcggacaacgtcttcgccattgcatccacctcactacatttattgtacaacaagagcccaattttgtcaaataaaatttaaattatatcaacgttaataagtcattgtcaacaaaattattttgacaaaattctattgatttctgcgttatttttcacaagttccggaaatttatgtatcaatatgtaaaataattaacccgcatagcgaaatatatgcgggttttatcactcatccatttgatttatacggcataccgacacgcagcacacccttcgtttcaattcctcccagccctttctctctcgtcagcgtatttctcaggacatcccatacattgatccgctccataaacggagtgaagctgattttcgcgacaatatataccgggtcaagcgcgtggatattgacgcgtgacggcgaacttgcaaaattcgcgcccgctctgattaaagactcgaaatgagattggcaggcccccgcgaatataaccagctgatccaaatgagggactttacgcctcgctctttgaacggtttcgacaaagtgtttggaatgcctgtaggcgcttaaatcgttcacgcctcccttatgcttggaatatgcatcatggccggtgatgactaaaatatccggcctgtatttatcaagcagctcgtcaattgatgccggcatttttttctcatggcaatgaattccgtataccggcacaccgattttttcataaaagttcaggcactttttcaaataggcctcatcgccgtccagatgcaatacctttccgggcatatgaaagtagtgctcctgatgctgatattgatttgtcgcataatattcctgtttttcccgaagcagcttataatcctggcggagcagctcgagagattcattcatcctgctttcatctcttttctttctcatggcctgttcgtcttttctgacaggctccaaatcagaaaaatcagcatccgcaatcaatctgacttcgtcaccatgcaggatggcaattgaatttccgttgcttgtttgttctataccgataatgcgaaataaaacatccatttgataggatttcctggctaccatatctcctatttgaaattgcacgttacccactccacaaatagactaagcctcatcatgaaagaagtcttggcaaatacacctctttccgctgcggcgcttgatgtttcaagcttttcttgcagttgaatgaataaggttctcctctagcctatgtagcggcagtccaagtggtgacgcaaaacaaaaagccctcttagaaaagggctttatgcaatccgttggacaggagcgcgaattcttctatggacagggattcaccgcgccgctttccgtcaatattcgtttcttgaagaacttcttcaatttgagcttttttctcttttccgcccggaagattgttcacaaggttgttaagcaaggttttccggcgctgtgcgaagcttgctttaatcagctggaagaaaaacggttcattatcgacgtcaaccgccgggccgtcacgaagcaagagacggatgacggcagaatcgacattaggctgaggcacaaacaccgttttcgggacggtcatgacggttttggcctccgtatagaactgaaccgcaatggaaagcgatccgtactccttagaggaaggatcagcggccatccgctcagcgacctctttttgcagcatcacgacaattccttttaacggaagatgttcttccaagagcttcatgatgatcggcgtcgtcacataatatgggagattcgccgtcaccataatttcatcacaatcctgaaaatgctcttcaatgacggatttgacgtctgctttcagcacatcttgatgaatgatcgttacattgtcatacggagacagcgtatcattgagaatgggcagcaggcgctgatcaatttcaaacgcgacgacctttttcgcccgtttggcaagctgctctgtcagcgcgccgattccgggcccgatttcaatgactccggtccgatccgtaatttccgcatggtccacaattctgtccaatatatttgtatcaattaagaaattctgtcccagactctttttaaaagaaaaaccgtactttttcagaatttccttcgttctgataggtgtcgcgatatctttattgttcatcctgttcctcctgcctcatagcatcgagcgcatcaataaaatcacttcttttgatttgaaacatttgcagccgtttttgaagctgcttgccgtttgtatagccgatcttcagcaggtcgcccaatcgttcgcggcgtcttttggcagccggtccgccgatcagaccggcctgtatgacatcttcagctgaaatctcactcggctttgcctccatctcttcatgtacattttccagacatgctctgatgctttcaatggatgcgtgctcaacgccaatgccgcgcttgtttttcggtttggcaagatgtttgggcagaaatgcgtgtttacagccgggtactgcttcagaaatggttttccggatcttttcccccggaaaatccgggtccgtcagtacgatgacccctctcgtttcctgcgccagccgaatctgtctgatgacttcgtctccgattgcggaaccgtttgtctcgatcgtatccgcatcaacggcaagttttatgcgcgcagtgtcatcgcgtccctcgactacaataatttctttaattttcattacttcctccaaaaaaactttttatatccaaaacgaaacctttgcttgcatgtcacgtctaatatactgaaaatacactttacctattataacgaaaaaaacagagggcgcaaaaccctctgagtgaatcggaattaatttaagatttttattttgacctgtttctttccccagcggtaagccgaagatttttcagggaaaaagacatcaatccgtcttcctttaatggctgagcctgtatcagcggccacggcatccccgtatccgtctacgtggactcttgtgccgagcggaatgacgcttgggtctaccgcaatgactttggcattcggattgcttgtcaggttaacgcctgtagccgtatggccggaacagccgctgcagcttgcggtataagccgtagaagacacggtaatcactttaccggaagatccggtttcgccagaagatgccttcacaggtgcactgagctgctcaatcttgggactgtgccgctttgtgccgaccgcaatgatttgatctttgcttttttcagatgtttcttctttaacaagctttcttgaaacttcttttccattttctttgacaacatgaaaatgctttttaagtttgccttcttttcctttttgaacgatcttttctttcccgctgtcgagagacgcatcttctttttctttcacttgatacgctattttttcctcaactacatcggtgactttttcgatacgagtgatttgtatgccggcctgattttttgtgagcttttcgtgtaatgccggttttactttatcttcgtctttcatgtccatcttatgctgcgttaaaaagtcagcgaccgtagtcgaagtcgtccatattttctttttctttcccgcatcatttacagtgacctgaaaagccgggtcgaccgtgactttcatgccgtttgtcactttcgtatctgctgctggatctattttatcgtgctgattcacaggtgtatgctgttcgttcagaaatgcgccgactgtttttgccgttgaccataaagtcttttcttctccgcctcttgtcacacggatctgctttgcagcatcatacacgacattcatgttgtctgccaatgctgtctgcttagacggggtaatccggtcttcatttctcgtctctatatgtaaatcttccagaagttccccaaccgtttttgcatgagtgcgtatttgctttttcttgccgttgatggaaacagaaactgattgttttgagagctcatgtgccccgtatgcagtcccggttccgcccagcagaataatagctgcaataagaataaccttgcttttaccaagctttacggaaaacagttttttcattttttgtgtgatgaaaaacgcctccttctcctcggagagattatatagagtatctaaaatgctgtcaaccctcccatctcgaagatgaaaaaccttcagcgtatccctcattatgcaaaaacaaagcaaaaaaaggaagagagacatatcgacaacctatcttatgaggagaaggaagcttgtagaaccgttttacatatccactgaatcggacaagcctttacacgttacgacagcgcattctgtcagttcatgcggaaaagtctttttgcgttttcggttgtaattgaggcaatttcttcatatgtcagcccttttaatgcagcgagctgttcagcaacatattttacgtagcttggctcatttcgtttaccgcggaaaggatgcggtgtcaggaaaggacagtccgtttcaatcagcaaacggtcattcggaatttcctttgctacttcttttggtttcttcgcatttttgaaggtaaccggtccgccgaatgaaatataaaaattcatatccatacactgccgcgcaacctccgcgctccccgtaaagcagtgcataataccgccgacttcttccgccccctcttctttcaaaatcgtgacaacatcttccgttgcatcacgattatgaatgataattggaaggttcacttctttggcgagagcgatttgtttccggaatacttctttctgaatgtcttttggtgatttatcccagtggtaatcaaggcccatctctccgattgccacaactttttcgtgagaggacagttccttaatccatgataaatcttcctctgtcatgtcaattgcgtctaccggatgccagccgatcgcagcgtatataaagtcatattcctcaatcagctccatcgcacgcgtgatagtgggtttgtcgaatccgacaacgacgatccgttcaaccttttcagcctttgcacgcgcaatgacttcctctaagtctgtgtcaaattgctcggcatttaagtgcgcatgtgtatcaaaaagcatcataaaaactcctttcttgttgaaaaacaaaaggtgttcgacggaatgttacacgtgaaacaccttttgcatctatttatttaattcgagtgcctttcggtaatgactggtcgacagctacaactttgagaacgccgtccgattctcctgccagtatcattccttgagaaagctcgcctctcagttttaccggttttaaattcgttacacaaatgatcttcattcccacaagctgatccggtgtgtaatgcttcgcgatacctgatacaacttggcgctgttcaaagcccagatcaatttgcaatttcagcagccgatctgcttttttcaccggctctgcggacaagacttctgcgacgcgaagttctgtatccataaattgatcaaacgtaatttcaggaagacgctctgcttcttgcggctcttccgccttttcttctttagcaggagcagttccttgcattttttgcttgatataagctacttcttcttcagcttcaagacgagggaaaagcggttccccttttttcactttcgcgttcttcaattggccgaatgtctgaatgctgtcccaagctttaagagactgatcctcaactccgagctgggcaaacattttttcaggcgtctgcgtcaagaaaggctggagcaatacggccgaaatacgcaacgattcagctaaatgatacatgacagaacgtaattctttttctttttcctgatctttagcaagcacccacggagcagtttcatcaatatatttgttcgtacggctgattaattgccatagcgttgataaagcgactgaaaactccatgttttccattgccttttcataagctttaaccgtttcaccggctacagaagaaagctctgaatcaaaatcggtcacatttccttcatatgaaccaatctcgccgtcaaaatatttttggatcattgcgactgtacgattcagaaggtttcctaagtcgttcgccaagtcataattaatccgttctacgaaaccttccggcgtaaagacaccgtctgaaccgaacggtacttcgcgaagcaggtaataacgaagttcatccaagccgtagcgttcaattaacgttaccggatcaacgacatttccttttgatttcgacatttttccgtctttcatcaataaccagccatgcgcgaatacttgcttaggcagcgggagatcaagcgccatcagcataatcggccagtaaatggtatgaaaacggacaatttctttaccgacaaggtgaacgtcagccggccagtactttttgtaaagctcatcattttccgtatcgtaaccgagcgctgtaatatagttgaacagtgcgtcaatccatacatatacgacatgcttcggatttcccggcacttttacgccccagtcgaacgtcgttctggaaacggccaaatcttcaagccccggtttaatgaagttgttaatcatttcatttttgcgtgattcaggctgaatgaaagaaggattgtcctcataaaacttcagcaggcggtctgcatatttgctcatgcggaagaagtatgactcctctttgattaattcgaccgggtggccgctgtccgggctttttccgccgacaacctcacccttctcatttcgttccacatccaccagctgtgtttccgtatagaatgtttcatcaggaatgctgtaccagccctcatactcatccaggtaaatgtcaccattatcgagaagtttttgaaacactttctcgataatttctttgtgccggctttccgtcgtccggatgaaatcatcgtgagaaatgtcgagctgcttccatagtttctggatttcagcaactgcgcgatccacataagcttgaggcgtgatattctcttcctccgctttctgctggattttctgtccgtgctcatccgttccggttaagtagcgtacgtcaaatccttttaatcttttgtaacgcgccatcgcatcgccggccacggtagtataagcatggccgatatgtaattttccgctcggataatatatcggggttgtaatataaaaagtattattgtcttgcggcatgttgcaacctcccattcagaatgtcgaaaagctcacgcccaaaggacgagagcggttttatttgatatacaatattgatatttgtcctctatctatgataccatcttagcctttaagatcaaggatatatacgtactgcgcgtaaaagagtaaataaaattaaaaatttttattgaaattaaaaaaagtcttaacatgtcgaaatttgtcgtatataatctactaatataaaacatcttggttcgaaagtcttgatttaaaaggattttcagtaggataataggttcgaaaaagcagtcaaaaagcctgttatttcaggatttccaaggctttacttactataagaactaattcttacaatcaatagtaaacaaaaagattgacgattattggaaaccttgttatgctaggaatgcaaggaattttgtcgaataatgacgaagaaaaatataaactacaaaataattatctctcgggaggagactgttaatgaaatctactggtatcgtacgtaaagttgatgaacttggacgcgtcgttatccctatcgaacttcgccgtacactgggcatcgcagaaaaagacgctcttgaaatttatgttgatgatgaaaaaatcatccttaaaaaatataaaccaaacatgacttgccaagtaactggtgaagtttctgatgataaccttaaacttgccggcggcaaattggtactcagcaaagagggcgctgagcaaatcatctctgaaattcaaaaccagcttcaaaaccaaaaataagctatttcatacaaaaaccgttcttgttacgatacaagaacggttttttttatgattgaatgtgataagcgtcataaatctcgcgtttcggaacgccccgatctaccgctgtttgttttatggcctgtttggaagatgctccttcgtttatgtaatgctccacatgctctttctcagaaagctccgtccaccaaggcttttcctcttcatccggttcagcggtttgatttccttcgacaacgagacagaactcaccgcggatttgatcttcatttgcccattccatcacctcggcgatggttcctctgatgaattcctcatactttttcgttaattctctcgtgacggcgatggttcgattacccaaaacatcatgcattgctgttaatgtttcttttaatctgtgcggcgcttcgtaaaatatcatcgtttcctgccgttttttcaggatttcgagttctttcttcttttcttttttctgtctgtttaaaaatccgtagaagaaaaacggctgcggagtgatgcctgatgcggtcagcgcggttaatgccgcattagcacccggaagcggaacgacatatccgccgatttgggtgaaatctctcacaatctcagcccccgggtcggaaattgtcggcatgccggcatcactgaccaatgccacattctttccgtttttcagccattcaatgattttatggccgctgctttctttattatgttcatgatagctgatgagagatgtttctatatcataaacatggcacagctttttcgtctgtctcgtatcttcggcagctatgacatcggccgatttcagcgtctctactgcacgaaaggtcatgtcctccaaattgccgatcggtgtaggaacaaggtacagagttcccatttcagattttccgttaaaactcatctggcgtcttaacatatacagcctccttgctgcgtcgtttttcttctatatattgctcttttttctttcgggtcagctgcttaaaacggtattccgcctgcatcgcttcccgttttgtttcaaatgattccgcatggcataacgaaaccggcctccgcgcccttgtgtacttcgcgccctttccctcattgtgggttttcagccgtttttgcagatcatttgtataaccggcatacaaactgttgtcattgcacagcagcacataaaagaaatgactatttgtctccatataaaatcgtgcggatctctttcgtatattcattttgttcattgtatacgaacagcgggggaagaattttgagatcagggcggccgcctttaattccttcaaccaaaatggtattcgcttctttaccttgtttcggataaataaactgaacccgtttcggttctattcggtacgctttcattaattcaaagatttccaaaagcctccccggccgatgaacgagagccgcttttccgccttgtttcagcagtttgctgctgacggaaatcacatcttcaagcgtgcaaaggatttcgtgccttgcgattctgagatgttcgttcaggttctgctccgcctctttcggtgttttaaaataagggggattgcaggtgacaacatcatatttattatgtccgagtctttccggcatatttttcagatcatcatgaatgagactgatctgaccgcccagcccgttgtattccacgcttcggagcgccatatcatacaagcgttcctgaatttcaaccccggtgatatcggcttttgaccttgtgctgagcaaaagcggcacaatgccgttccccgtgcataaatcaacgatgttccccttttgaatcggaacgtatgcaaacttagacagcagcacggcatctaatgaaaaagcgaaaaccgtcggactctgtactattttcatatcctctgctaataagtaatccaatctttcatcatcacgtaatgaaaccataatcttattcctttcggcactctttgaaaaaggcttccgacatcagcggaagccttttccttattttttatttaagaaggacagacaaaaaaggcaatctcccttgcggacgcttccataatggacgttgcaaatatgaaagccttcttgatacagccgggccagattgtcgtacccttctcctatatcactctgctctgccttctgtgtttttgtttctttctgatcggctttgaatttctcaatttgctctgtcgtatcatcaagccgcttacgcaaatgcttattttcaagctgaagatggtgattctcttcaatcatttcgccgatatgctgctttaagtcacctagctgacggtacagcgaaccgatttgttcctccaggtttatgacagtatcaaataactcttttttatccaaggttccacacctcgttaatctgtggtttgtgcggatacgacgccctcttccaagagctcttcccaagtatattctatcactttttcacgattcttcagttccacctgaagcacccgttccagaatattaagaccgacaacctttgcggggccgtttgccgtcgtaatcatttcgcctaaatccggcagctgttcttttgccgtctcatactcatcattttcgtacttcaaacagcacatcaaacggccgcacagaccggaaatcttcgttgggttcaacgataaattttgatccttcgccattttgatggacaccggttcaaaatcaccgaggaacgtggagcagcaaagcattctcccgcagggcccgataccgccgagcattttcgcctcgtccctcaccccgatttggcgcaattcgattctcgttttaaagatagaagccaagtctttgaccaattccctgaaatcaacccgtccgtctgctgtaaagtaaaaaataactttattgcggtcaaatgtaaactcaacatcaaccagcttcatatctaagccgtggtcagccacttttttctgacagacttcaaaagcggacagggcctcctgtttgttttcttctacaatgagaagatcgcgttcatcagcaacgcgtatgacctttcgaagcggaagcacaacatcatgctcgtccacttgtttatttgcgatgacaacctgcccgtattcgacacctcttacggtttcaacaatgacgcagctgtcttgttctatatcaaatccgttcggatcaaaataataaattttccccgcttttttaaagcggacgcctattacgttgtacaagcttatccctcctgcaacgttaacaccaagtgctccattaatccctgcacattcacattggaatgaagccgtttttttgcttctaaaacagcgagaatttggttcgtaacgctttgttgtgtaaattgcagcgcatgctgttttattgattggaataagtcttgataaatcagtttatcttcatttccaatttggatggataatacatcacggtatatcaataagagcatatcaagacccatttcttgatgggttttttctttgaaaaagggcacccactgatcctgaatgaagaaaaaggcatgtcctttccgctgatgtaagacttcatacaattttatcactttcgctctggactctgcaaactcatcatttcgacttaattcgactgcttccgcaatattatttgtcatatttgctaagagccgggccatgtgagggctcacttcctgttcaatcagtctttcttctatggctttcggctgaagcggctggaacggaagaacctgacatctcgaaacgatggtatccagtattcggtggagctgctcagtaataagaattgcgatggtgtcttgactcggctcctctaaaaatttcagcagactgtttgctgcatttgtcgtcatttgatccgcatgggatataatgtacagctttttatgcgattccagtcctgttttagaaaactcttcctgaagcgattggatctgagcctttttaatggataatccgtcgggctgaaccacatggaggtcgggatggtttccggattcaatacgcttacagttccggcactccccgcaaggctcagtcccgtcttcaaggcaaaaaaagctttttgcgagaagcagtgcggcatccaatttgcccgttccttttttgccttcaaacagatatgcgtgagaaagccttttcttttcaatgctgttatgcaaaagccgcatcactctgggctgctgcccggtcatttccttccatgatattgccattgtatcactctctatgtgtaaaggttaatcaataaaccttttatttctccgattcgatccagcaaatcaattgccggtttttcctgatctaacatttcttctgtcagctgaagcagtttttcatctatttctttcacaagccccagagtccggctgcttccgtacaggtcaaagcttttctccgtctcatgcgataatccgctgtctacggcctcttttacaaaacgttttaccaatcctttgaatttcgctaagtctttgaagtttctcgacttcgtcagccttttcccgaacgtttctatatccgttaagaacctgctcagctgatcaaatttcagcttgctgctttggctgtccattgaacttttaaatgttccggaaagctctgccgctttataagcaggctgctgctttttctcaataaatgtacgtaagtcagaatttattttcacgtcgtcaaatccttaaaattgatgaaattcatcgaccgggaggacaaagaccgtcgctccgccgacttccacttcgacgggatatggaacgtaggaatccgcattcccgcccatcggggataccggggcaatcatctgatcacgtttacagccattctctttaatgaggctgagcgctttatcgacacggatatcttccaccccgatcataaacgtcgtattgcctgatttaaggaatccgcctgttgtcgcaagcttcgtcaccctgaagttgtggtcggttaatactttcaaaagcctgttgctgtcctgatcctgcaccactgccactattagtttcattctctaggccccctttaggttggaaagaacattatcgttacattcattatagcaacttatgagaaacaggtcacaactgaatttttttcaatgcttcatttatcacttgaagtgcgtcctgaatgacgagttccttctttttcgatgcgtcgattgtatggaatctttccggaaaacgctgcattaccttttggtatccttcccgtactttcgtatgaaagtgcagggcctcaagatcgagacgattcttctctcttgaatcattcgacgtaatccgtttcaacccttcttccggctcaatagaaaaatagatggtaacatcgggcatcgtatcgccgattgcaaactggttaatagaaaggacttcatcaatgccgagccctctcgcatagccttggtaagccagcgaactgtcgatgaaacgatcacacagcacaatgcggccttctttcaatgcaggctgcaccttttcgactaaatgctgccttctcgccgcagcgtaaagcagcgcctccgtttttgcatccatcagtgtattgtttttatttaagatcacttctctgatctgttccgcaatgtcgatgccccccggttctcttgtcgctgtcaccgggagcccctctgccgacagaatctctttcatttcctgaagcacagtcgttttccctgcaccttcaggaccttcaaatgttataaataaaccgctcatgatttctcctcttctatatagacaagtaattgttccccgtttaacaagccttgaatatgcgcgtccatgccgattaaacgggaaagcttttgtacgatctcttctgttatccgttctccgtccatgatcagcggaattcccggcggataaggaataatgttgcccgcatgcaagcgcccggccgccttatttatatctgcaggctcttttgtaaacttccgcatctcattttgcggatattcaagtgtcgaaatggacggaaatgtccaattcacggcatccggcaatttatcgggcggtgtattctccagtttctgctgtatgtttcttacggttgcctgttctatcatccgccggccgcctatcggcagtacgagcaatacttggtactcgtcagccagctcggcaacaatgccttcactctccaaaatccgttgtaatgaatagccggaatgtccgagctttgaccgaagaattaattttaacgggtctgcccgcagcccatatccggaaggctcgattatttcaatagaagaaattgatgcgaaccttcgtttgattttctcaatgtgctccatatgaacgggaagtgtccctttttcagcaatatcctgcacataagcgcgcgccgtatctaaagatgccataatcgggtatgacgggctgctgctttgcaaactgcttacataataagttaatcgatctctgtcaattctcgtgctgttcaaatgaaagtaagaccccatcgtcatagccggaagcgttttgtgagccgattgaacaacggcgtctgcccccatagccaatgatgaaggcgggaaaggctggcctaacacaaagtgagccccatgagcctcatccaccagtacaggaacgccgtatgaatgggctttgttaactgccgcggtcaaatcggcggcgtgtccgtagtaagtcggattggtcagaacaagtcctttcgcgttcggatatgacgccagcgctttttcgatgactgaaagggatacatgtgccggcacatgcatgttttcatcgatttccggcgccaaataaaccggcttggctccggccaatgccaccgcatggaaaacagacttgtgacaattacgctggatcagaatgggttcacccggttcacacacagctaaaatcatcgccagattgccggcggtcgttccattgacgagaaagaaactttcctgagagccgtaaaatctgctcaccaaatcctgcgcttccttaatgacccccgtcgggtgatgcaagtcatcaagacccgtgatctcagtcatatcaatagataaaagagattgatatacagatttggcttcatcaaaaaagacatctccattgtgatgtcccggaacatgaaaagaatacgtatttcggtgcgcatgcttcatcagcgctgtatataaaggtgtgtccatttttaaacaaatcctttgcctgtctttcttattatatcgtgcctgcgagccaacttaaagctaagactttttgccatctagccgttatcccggccggacctcatatcaagcagcttcttttttaaatcgccttccatgataacaagctcctcctcggcacgcctgcgtttcatcctgccttcttcttgaatagacatgatttcttcaagtgtgctgactaagctttcctgcacttttttgagggtttctgcctcaacaagtccgcgctcattggctttcgctgtctcgactgtacttgttttcagaagttcagcgtttttcagcagcaattgatttgtcgtatctgccgccttctgctgcacatctgccgcactccgctgcctcataagcgtcagcgcgatggcgacttgattcttccataaaggaatagccgtaacaatggaggactgaattttctctgccagtgcctgattcgtgttttgaatcaggcggatttgcggcgcactctgaagcgtaatctgcctgctcaacagcagatcatgcaccctcttatccagacggtcggcaaactggcgaagatcattcacttcctgcgcggccatttgattgtgttcttgtaattcggcttttcttgccgcttcgggtatcagctttgttttcagctcatctaattttaattcccccgctgctatatacatagttaaatcagtaaagtactgtttattttgggcgtacagctgatctaacaatttattgtcactcaacagcacatttttagaatgttccagccttctgctgatacggtcaatctgcacacttgtcttttgatatttcgaaagcacttcctgtacagaaccggacacccttttaaacagccgggcgaaaaatcctttgttcttcatctgcagatcatcggggtttacctggtcaagcttcagcatcaaatcagccagtatctgtcccatctctcctgcatcttttctttgcacgtgctctatcatcgtgtgggaaaattccagaagattcgcctgcgcctgtgaaccaaacagaacaatgctttgcatgttctcagggtccagtttttcagcgagccgaagtgccgcttctcttttttcttccggcagcgtatctgcaagctttagaggggtctggtcattttgggcgcccatgctgtcgtcggaacggtctttggccatttccttcttcctttcttattttctcagtgaatgctttgccacatctaattcaaagtgcaggtcgtcgatgtcctccttcatcagttcatgaagatcctcttccagccttctggaaagctctgccagagtcatcctcgtatcactcaaggacattgataaatctttattttttcgcggctgtgaggagagcagagcatacttttccgtcagttccacaacagaatcaagcgtttgataatagaaacgctctgcctgataaaaacgcttcggctcttgctttgtgagcagatatattcgtcgggttatccgcagtatctctgcattctgcttcagcatttgtatacttttagagcgaaaaagcgccctgcgtaatcggatgattttaccctttgcttcctcaagattttccttgatataagcatattcttttcttgtcagccggtgtttttttaaaaagagacgcttcgcattccacaagccggccgcactgactgcggctccgccggctgccccgtataaaagcgaatacagaaaaggctgatgccctatcgtaatgaaggttatccccgctaatacaaaaactgtgctgccgcaaaacgtccatttcatatattgaataaacggtttcatacttgatcgactcctatttattcacttttatcagtattatctattacattccatgtctaaacaagttcctcttcttatcgtatcagttcttttataaaaagtgtaaaaactcctctgatttcaggcaaaaaaaagacccttttcagggttaagaatataacgtcggtgtatgaaggcttttcagtttacgaacgaaaaattcataattcggatcagaggtcggagtggaaactactttcttctcacactctaaacatataaatttcgtataaatatggattcccctgctttttttggtttcacacacaatacatgtttcttcatggctggacgtttcattcattttgcccacctccgtatgaatagccttcccttaagctgttgattgtatacacaatttggacctttttgaagtttgcaattagtatatgggcgtttccgtatttcggtgtttgttttgtttttgaataaaaacaaaaaaggcagctcatgatgagctgcctttaccgtaatgatagcttggcggcgtcctactctcacagggggaaacccccgactaccatcggcgctgaagagcttaacttccgtgttcggcatgggaacgggtgtgacctcttcgctatcgccaccaaaccattgagagtgttctctcaaaaccagataacagtaagcatacattcaaattggttaagtcctcgatcgattagtatctgtcagctccatgtgtcgccacact

SEQ ID NO: 10 - DNA, 25019 bp, Bacillus subtilis
gtgcacgcttgacgctgaaacggcatccggccttcaccgcattgcccgggatcacggctccactttgtatatggtgcttctcgccgcgtacaatacgctgctcgcgagattgagcgggcaggaagacatcatcgtcggctcgccgattgccgggcgtccgcacaaagaccttgaaccgattctcggcatgttcgtcaacacgctggccatcagaacggagccgaaaggagacaaacggtttaccgattacttggcggaagtccgccaggccgcgcttgaagcgtatgagcatcaggactacccgtttgaagagcttgtggagcggctcggcgtgcagcgggacacaagccgaaatccgctgtttgatgtgatgtttgtgctccaaaatatggagcgtgaatccctggtgttaaataaactgcatttggctcaagctgcggatacaagtcataaaaccgcaaagtttgatgccacgctttacgcgtcagaagggtctgacggttccatcagctttgattttgaattcaatacagatatctatcaaaaacagacaattgaaaaatggctttcttattttacccgtattcttacaaaagtaattgaaaaccaagcgatatcgcttggtgacattcacgtactggatgatgctgaaacaaatcgcgtcatttatcagtttaatcagacgaaaagcgattacccaagacacgaaaccatcagccgtttatttgagcgtcaggcaaaagaaacccccgatgcccgggcagttgtatatgatggacaaatcttgacataccgtgagctgaacaaacgggctaacagaatagcggcggctctccgatcaaatggcgtcggtccggaaagcgttgtcgcattattaaccggccgcacaacagagcttgcttccggaatcctcggaatattaaaagcgggaggcgcctacttgcctattggtgacgatgtgccgcgggaacgggctgaatggatgcttaaagactgtaaagctgatattcttctccaatctgataaacttgacggtctgccgctttcaggaaaacgtttattcatagaggatattcaaacaaaggccggcttgagttcggaaaatcccgaaccgctcggcggacctgaatcattggcctacatgatttatacgtccgggtcaacaggtgcgccaaaaggcgtcatgattgaacagcgaagcgtgatccgccttgtgaaaaacagcaattatatcgattttacgccggaagacagactgttgtttacttcatcattaggatttgacgttacgacatttgaaatattcggtccgcttttaaacggcgcttctttatatgtaagtgaccaggaaacctatctcgactctgatgttctggaaacatttatacagcaaaacggcattacgacactgtggctgacatcgtctttgttcaatcatctatcagaacaaaatgaacacgtgttttccggattatcccgattgattattggcggggaagcactgtccccaagtcatgtaaaccgggttcggaaaacgctgccgcatctttcaatatggaatggatacggaccgactgaaaacacgacgttctcgacttgctttttgattgaacaatcatacgatcattcaatcccgatcggccgccctgtcggaaattcaactgcttatatcataaacagcaggggaacaccgcagccgatcggcgtcatcggcgaattatgcacgggcggagatggtgtggcaagaggatatttcggccgccctgagctgacggaagaaaaatttgtccctaatccttttgttcccggagaacggatgtaccgcaccggagatttagcccgctggctgccggacggaacgatcgaatatgccgggcggatggatgatcaagtgaagatccgcggttatcgggtcgagctgggagagattgaagccgcactgaggagcctggacggcgtgaaagaagccgccgtgtcagtcagaaccgggcagtccggcaataaagaactgatcgcatatatgagtctgcaggcggacatggatacagaaaaagtgcgttcttcactgtctaagcaactgccgaattacatggttccggcctatataatggaacttgagaagctgccgcttacgccgaacggtaaattggatcggaaaaatctgcccgaaccggagctcgcgcttcaaaccgcgtacacagctccccgcaatgagcttgaagaacagctttccgtgatctggcaggaagtgctcggcacaaaacaagtcgggattgaggactcattttttgagttgggcggcgattcaatcaaagcgctgcaagtttccgcacggctcggacgctatgggtggaaaatgacggcaagcgacttattccggcatccgtccattaaggagctcgcgccgcttatccggaaagcggaaagagtcatcgatcagcggccggtggaaggagacataccttggacacccgtccagcactggtttttatcacagcggatggaaaacagaaatcatttcaatcagtccgtcatgatgttcagctctgacgcattgcataaacagccgctcaaagaagccttagagcatcttgtcattcatcatgatgcactccggatcaccgtcagtgcagaaaacgaaagtttcagacaaatcaatcacggtattcaaaaagatgaactgtacaccttggacatttgggatctgtctgagacagatacttgggaaagagaaatagaaactgaagtggctgcgctccaacagcggatggatattgaaaaagggccgttattaaaagccggctggttcaaaacccggtccggggattatttattcatcaccgtacatcacctggcagttgacggagtgtcatggcgtattttgctggaggatttatctgccgcttacactcaagccgtaaaaggtcagccggtccagcttccgccaaagaccgattcgtttaagcaatacgctgaaaggctttcagaatacgcaaaaagcagcaagctgatgcgtgaagaggaatattggcgttttattgaagaagaaacagccgccgaacttccttatgaaaaaccgcagcatcagacgggagccgacagcattcggcaaacggtaagctttacgcttacagaagaagaaacgtccgttttgcttcagcaggtcaaccgggcctaccataccgatacgcaagatattcttctgactgccgcagctttggctttacgggactggacagggggcggcagactgcgcatcgcgatggaagggcacgggagagagcacatcatgccggagctcgacatcagccgcaccgtaggctggtttacctccatgtatccggtgctcattgacttgaacacagcaggcgctgagcttggaacggcggtaaaaacggtcaaagacacactcggaagaataccggataaaggaataggctacggcattttaaaatacatgacaccgcctgaacaaaaaacaatccgcttcagacaagcgcctgaaatcagctttaactatttagggcaattcaatgatacagaagatcagcacacgttcagtctgtccggtcttgcaagcgggcacgacatcacgccgacatggcagcgggaacaagcggtggaaatgagcgcgatggccgcacaaaacaaacttcacttcagtttgagctatccgccgagccgcttccgcaaagaaacgatggaacagctgctgcaaactttacagcaatatttgcgtgatattatggcgcactgcaccggcaaagaggaagcagaaaaaaccgttagtgattttagcagcaaaacgttaacatctgatgatttggacagcatagcgagttttgtcgaggaactgtagaaaaaggcgacggggagattataacatgacaaaaaagaatgcaattcaggatatttatccgctgtcttatatgcaggaaggaatgctttttcattccctcctgcaaaaggaatcacaggcttacgccgagcaggcctccttttcaataacggggaaggttgacacccgcgtgtttgaagagagcgttcatgcccttttcgaaagacatgatattttcagaacgatctttatcagccagaacgtgtcagtgccgcagcaggtcgtattaaaagagcggaacgtcagcatcattgagaaaaatctcaccaatttaaacaaggctgatcaaatcaagcatattgaagaagccaaacgaagagaccgtaagaaagggtttcatctgcaaaaagacatgctgatgcgggtgacgctgcttcaaaccggtgaatgtgaatatacgtgcatatggagtttccatcacatcattatggatggctggtgtctcggaatcgtgctgaaagagttcttccagatatacgcctcgcggctccgccggacaccgttaacgcttgagcccgctgtgccgtacgggacctacatcaagtggctgatggagcaagataaagaaaaagccgcttcgtactgggagcggtaccttgaaggctttgagcagcagactgtactgccgaagcagaaaaaagccggcgaaagcagacaagaggaagtgacgttttccttttcaaaagaggacacggctaaactgaaagagctggccgtaaaagaagaggtcacgctgagcaccattttccacacgctctggggcattttgctccaggcgtataaccagacagaagatgcggtttttggttctgtcatttccggaaggccgtctgaaatcgaaggcatcgagcgaatgatcggcctgtttattaataccgtgcctgtccggatcagcggggcaaacatcccgtttcaaaagctgatcaaaaacgtgcaaaaggacgctttgaaaggacaggcatacagctatcatccgctttatgacatacaggcgaattcacaggtaaaacaaggcttaattgatcatattcttgtctttgagaattatccggttgaacaggagcttgatgtgctgaacagcaagggggacacgaaagacctttttcacatccatgatttcagcatggaagacgaaaccaactacagtttttacctgatggtggcgccgggtgacgagattcatttgaaaatgagatacgattcaagcgtgtatgaccgccaatttattgaaaatatcaaaggccatttggcacatatcgtctcccaagttctcgacaaaccggacatcacgccggacaagcttgcaatcatcactccaggggaaaaagcgcagctgcttgcgccgatttctgaagagaccgaaaagcctgaatatgacacggttcatgcgatgtttgatcggcaggccgcaaaaacgccggatcaaatcgcgattcggtatgaaggcgagtcagtaacgtacaaagagctgaacgaatcggctaataagctggcccgcctgctgcaaaagcgcggattaaagcgggaggaaccggtaggcgtcatgctcggccgttccccttctttagcggcggccgttctcggtattttaaaagcgggcggcgcctttgtcccgatagatccgggcagtccaaaggagcgtattcgatatgtcattgaaaacagcggctgcgtccatgttgtaacagagcggcatcagtcagtgcccgcggaacaaacgctgcaggttacatacatagaagacgccgggacggaagcggacggaagcaatgtgcaatccattaatacggccgatgaccttctttatatgatttatacatcgggaacgacagggaaaccgaagggtgtgctgctcgaacataaaaatatggccaacctgctttctcaccaattgacgaacacagacattgatttttgcacaaatgtgctgcagtacgcatctgtggcgtttgacgtctgctatcaggagttattttcagtactcttgagcggcggcaccctttgtatcgtgcccgaatcaatcaaacgagacgtttctcagctgttttcgtttattgatcagcacaacacggaagttgtgtttttcccgactgcgtttgtcaaaatgcttttcaatgaagaaggttatgcacagtcttttccccgctgtgtgaagcatgtcattacggccggggagcagctgaccgtttcgcgtttgttcaggcagacgctccgtttacacggtatgcatctgcataatcattacggcccgtcagaaactcatgtggtttcaacgtatacgatttctgcgggagatgacatacctgaacatccgccgatcgggaaaccgatccatcataacaagatgtatattctcagcaaaaataggcagcttcagcctctcggaattgcgggagaattgtatatttccggcgcgaatacaggaagaggctatgtgaacaatccggcgctgaccgaagagaaatttttgccggatccgttcagaacggacgccgtcatgtaccggaccggagatttggcaagactgcgtgcggacggccaaattgaatacatcggccggacagatgatcaagtgaagatcagagggtaccggattgaaccgaaggaaattgaaaccgtcctggcaaatcatcatgccgtgaaagaagctgccgttctgattcaaacgaatgagtcgggcgaaaatgaattatgcgcctactgcagcgtctcacaagcgactgatccttctcagctgcgaagtgatttggcgaaagagctgcctgattatatgattccggtcaaatgggcttttgttgactcgattccgctcactgcgaacggaaaagtcgatcagcgggcccttccggaagcttcggcatacgcagcgggccgtcaatatacagctccccggaatgtgacggagctgaagcttacccgcatatgggaagaagtgcttcaaagcggcccgatcggcgttcacgatcactttttcgagcttggcggccattcattaaaggcgacggcactcgttgcaaaaatagctaaagagtgcagtgtgcaaatcccgctgagcgatgtcttcagccatccgactgtagaagaactcgccaaaatcatcagtgaagcagaagagaacccgttcgcatccatagaaaagacagaaacgaaagaaacatatcctgtctcatccgcccaaaaacggatgtacgtccttcaccagcttgaaaatggcggtgccagctataacattccagccgttttagaggtgaaggggccgtttgaccgagacaggatggaagccgtgttcaaggaactgatccggcggcatgaaccgcttagaacatcctttgaagaacaaaacggcctgcccgtgcagaggattcatgacgacgtgccgttcgcatttacaaaagaacaatcagccgaagcgtttatccggccgttcgatctcggcaaagcgccccttttccgggcgggatttgtccaaatagaaaaagaccggcatctgcttttagctgatatgcatcatattatttcagacggcgtatccgtcaatcttttgatacgtgaattcagtgagctgtatgctgagagaagtctgccgccgttacggattcaatacaaagattatgccgtctggcagcaatcatttatggcgggcgccgcatatcggaaacaagaggagtactggctgaaccggcttgccgatgagattcccgtgcttgaattgccggctgataagccgcgtcccccggtgcggagcttttccggagacagggtgtcatttgtcatcaatgaaaaacatacagctcagttgaaaaagctggcgaaagaaaacaaatgcacactgtatatgacgctgcttggtgtgtacacagttctgttagcccgtttaagcggacaggaagatatgattgtcgggtctccgattgcaggaaggcctcatgccgaccttgacgccgttctgggcatgtttgtcaatacgcttgctttcaggacgcgtcccgacggaagcatgacattcaaagaatatttaaaggaaattcgccaaacagcgcttgaggcttacgaacatcaggattacccgttagaagagctcgtcgataagctcggtgtgccgcgtgacatgtcccgaaatccgctgtttgacacaacatttgcgctgcaaaatatggaacagcagaagcttagggcagccggacttgaactgcagccggcagacgtcagcctgccgatttctaaatttgacttatcgctgtacatctctgaaaacgccggtgaattgtactgccagtttgaatacagcaccgatttgtttaagagaaaaacgattcaaaaatgggcgggattttttacgacacttgccgaaaacgccgcggctgatccgggcttggaattagacgatatttctgttttgacagaaaaagaagaagagtctctgcttcaagatttcagccccttgcagaaaacagcgtttccgcttcatcagcctcttcatgatctgctggaacagcaggcggaaaaaacgccggaccgtccggcaattttaactgatgacatttcgattacgtatcaggaactgaacgaaagggcaaacgagcttgcgcaccagctgatcaagcgcgggataaggctggaggataaaactgccattatgggccggcgttctcctgacatgctgatcggcatttacgctgtcttaaaagcaggcggtgcatatctgccgattgatccggattacccggaagagcggattcgctttttactgaaagacagcggcgtgaaattcttactggcagaaccagaacttttcgcaccagatctttttgagggagaaacgatctctctgaaaagcggacaaacaggaaaacctgaagctgcggccaaccctaacgttccggtaaaacctgattcattggcttatatcatctatacatccggttctacgggacgcccaaaaggcgtgcaggttgaacatcggtcagccgtaaactttttatactcactgcaaacgcgttatggattaagtgattctgacatcattttgcataaaacatcatactctttcgacgcttcgatttgggagctgttttggtggccgatcgcgggagcttctgttttcctccttccgcaaggcggcgagaaagaccctgaaatgatactgaacgcattggagaataaccgcataacggcggctcattttgtgccatccatgcttcatgctttcttggaatatataaattccagaaaacagccgatcaaaaaaacctgcttaaaaagggtttttgccggcggcgaacaactgggcccgcacctggtttcccgttttcatgaccttcttgcgggaacggaattgacaaattcctacggtccgacggaagcgacagtagaagcggcgtactttgatttgccgcaaggaaaagaatttcataatgttccgatcggcatttccgggcataacatgcggctttatattttaaatcaaaagaaacagcttctgccgccgggctgtatcggagagctgtacatcgcggggacaggggtggcccggggctatctgaaccggcctgagctgacggaggagcgctttctcaatgatccgttttacccgggagaacgcatgtatcagacgggcgatatcgcacgctggacagaagacggcctagtcgaatggctcggacgttcagacggacaggtgaaagtccgcggctaccggattgaaccgggagaaatcgaagcggcgatccggcgcatcgacggcattcgtgaggcggcggtcaccgcccggaccgaacacggtgaaaccgcgctttacgcctatatcgaaggacgggaaagtgatgatgtgcgggcggagcttgcgacacgccttccggcctacatgatgccggctcagtttatagagatgagcgaatggccggtcacgccgagcggaaaacttgaccgccgcgcgctgccggctcccggcggagcggcagacagacaggcgtacaccgccccgcggaacgtcacggaaatgaagctttgcgccctttgggaagaggtgctgaaaaacggccccgtcggcatccgggatcacttttttgagcggggcggccattcgttaaaagcgacggctctcgtctcccgcatcgccaaagarttcggtgttcaggtgccgttacaggacatcttcgcccggccgacggtggaagagctcgcttcggtyattcaggayttggaagagagcccgtatgaagcgattcagcctgcgmaaaaacaggacacctatccggtgtcttcggcgcagaagcggatgtatgtgctccagcagcttgaagacggcggtgtcggctacaacatgccggctgtgctggaactgacgggccggcttgaccgygtccggctggaggagacgttccggcagcttgtggagcggcaygagtcgctcagaacgtcctttgaaacggggcctgacggcgaaccggtgcagcgcatccatgacagcgtrccgtttcagctsgatgaggccgagtcasctgacgcattcgtccggccgtttkgtctggaggaagcgccgctcttccgtgcggcyctcgtgaaagaatcggaygaacgtcatcttttattaacggatatgcatcatattatttctgacggtgtgtccgtcaacaccttgattaaagaattcggcgagctgtacgcaggccgttcgcttgcgccgatgcgccttcaatataaagactatgccgtctggcagcgrtcgtttcaggagaaagaaggatatcagaagcaggaagcstattggctgaagcggctwgaaggagagcttccggtgcttgagcttccggctgacaagccccgtccggctgtcagaagctttgcgggcggcagcgtatcgtgcacgcttgacgctgaaacggcatccggccttcaccgcatygcccgggatcacggctccactttgtatatggtgcttctcgccgcgtacaatacgttactcgcgagattgagcgggcaggaagacatcatcgtcggctcgccgattgccgggcgtccgcacaaagaccttgaaccgattctcggcatgttcgtcaacacgctggccatcagaacggagccgaaaggagacaaacggttcaccgattatttggcggaagtccgccaggcggcgcttgaggcgtatgagcatcaggactacccgtttgaagagcttgtggagcggctcggcgtgcagcgggacataagccgcaatccgctgtttgatgcgatgtttattcttcagaatatggagcgagaggagataaatctggccggtctgaaggcgtcacgatcagagcataccgaacatgatgtatcaagttttgacctgaccttatcagcggctgaatccgatggaaacatccgctttgaaatggaattcagcaccgagctttttatgaaagaaacgattgaacgatggatgggccacttactgaatctcttgcgccatgttgccgccgaaccggaagtcatactatcgaaagctgacattttggatgaagaagaaaaacaaaagttactgattgagtttaataacacacaaaccgaattcatggaaaaacacaaactgttgcaccagttgtttgaagagaaagcagaagaaacgcctcatcagaccgctgttattgaaggagcacagcagatcagctattcgcagcttaatgagcgggcaaatcggcttgcgcgaacactgcacaaaaatggattcggtccgggaaaaagagcagctatattggcaaaccgttcgattgaagcgatcgtcagtgttcttgccgtcatgaaatcgggaggggcgtatataccggttgactcccattatcccgaggaacggattcgctatttattaaaagacagcgcggcatccgtcttgatggtgcagtcagaatacaaagaacttgcttcacagctgacggataacaatttatttctcattcagcttgatcatgaagatcaatacgatatttgtgcaaagaatattcagccggcagcgtcaccggatgatactgcatatatcatatatacttcgggaacaacgggaacgccgaagggagtcgaagtcagaaatcgcagctttacgcatgcagcacttgcatggcgcaggatttatgagcttgatcttataccggtcagagtgctgcagatggcgagtttctcatttgatgtattttcaggggatcttgcacgcgccctgctaaacgggggaacgcttgtcatttgtccggatgacgtccggcttgagccacaacagctttatcggctcattgatcagcaccgtatcacgtttatggagtcgacacccgcgctgattgttccgtttatggaatatatatatcgccggaagctcgcgctgcaaagtgtaaaagtactggtactgggttcagatatgatcaagtcgcaggatttttatacgcttcatgaacgctttgggaaagaaatgcgaattattaacagctacggtgtaacagaagcgacaattgattcttcgtattatgaagccgaaatgagcgaagagccgcgggaagatgatgtgccgatcggtgttccgcttccgaatgtgcaaatgtacgtcttaaacaaagacaaacaggtccagccgatcggcgttttcggagagctgtatatcggaggcgccggcgtcgccaaaggatattggggacagcctgagctgacagagggcgcattcagtgatccgttacaaacgggagaaacgctttacagaaccggagatcaggcttgctggctgccggatggaactcttcgctttcaagggcggattgataagcaggtgaagatcagaggctacagaattgagacgggagaaatagaaagtgtgcttttgaaacacgatcaagtcaaagaagcggcagttaccgtgatgaaagatgctgaaggacaagcccgattagcggcatacatcgttcctaaagaggccgatatctcatcacttcgccagtctcttatgcaggagctcccggcttatatgatgccgtctcatattatcggtttagacagcatgcccctgacactgaacggcaaacttgataaatcggcactgccggcagaagagatacattcaacacaggcatttgtcgcgcccggcgatgaaaaacaggagatgttatgccggatttgggaagatgtgcttcatgttcagaaagcgggaattcatcactctttctttgagcttgggggagattccattaaggcgcttcaagtgtcagcccgactcgccggagaaggctggaacatgtcgatccgcgatttgtttcagttcccgacgattgcagaactcgcgaagcacctcacgccggctgttgcaacggctgatcaggggccgatagaaggaagcgctccgctgacaccgatccagcagagattttttgaggagccgggtgcgtttgagcttcattataaccaatcagtcatgctgtgcactgaagacagcctccaaatagatgcgctgtaccaggcggtttgcgcgctgacagaacatcatgatgcgctgcgaatgactttcactgaaaatgagcatggggaagccgttcaatataatcgcggaatcacaaagcagcatgaagaaatatttacgcttaacgtcatagatatttcagaagaaacgcagcccgaaaaacggatagccgctgaggaaaaagaaatacagcaggctatgcgtcttgatcaagggcctctgcttcatctcggagtgttccggcagaaggaaaccgaccatcttcttataacgattcatcatcttatcacggacggcgtgtcatggaggatattgcttgaagatctgcagacagcttatcagcaggcgttggaaggcaaacaaatcgaactgccgccgaaaagcgattcttatatcaaatacgctgaagaactttttgacatttccaaaagcaaagcattgctggaggaagccgcatactgggacagcgtgatgtctggtgaaacagcgccgctgccgaaaataactgatgaaaacgccggacgattgcaggaaaacgcgcgcactgcatcgtggatattaagcagcgaagtcacgaagcagctgctgttggaaacacagcaggcatacggaacggatgttcatgaattgcttttaacggcgcttggaatggcgcttcatgattggacgggttccgaacagatccttatcagcactgaggggcacgggcgccaggggcatattcctgacattgatatgtcaagaacggcaggctggtttacatctgtttacccggtgcttttggatatgagagtgccgggcggctcaggcgaaaaaaccgctcaccgcataaagacggtaaaagacatgatgagacgggttcctcatcacggaaccggctacgggctgctgagatattcgcgaaacattctttataaagacccagaaataagctttaactatctcggtgcgtttgacggtcttgagggagcgctgaagatgtcaccgttcaagccgcagcatgatatagcggccgggcgcatccgcgagtttgatttggatattaacgcgatggtggcggccgggcaactggaggtaaaagccgtttataccgatgtatttgcaccgggggcaatcgagttcttcatgaatcgtttccatactcacctcgaggacatcatcgcccactgttccggcaagaaagagcgggaaaaaacattaacggattacagccatacagaattgaccgctcaagcactatcaagcattgaagatctcgtaaaaggactttaatttcataaaaaggtgtgtggcattcgtgacacaagcgacagaaattcaagatatttaccctttatcatatatgcaggaaggcatgctgtttcattcgcttctggattccggatcaaacgcatatgtcgagcagatttcgtttacagtcagcggggatttatgcattgatacattccaaaaaagtctggatatgcttatcagccgttatgatattttcagaacgattttcataaaagaagtgcctgaccttgaaggaccgcagcaggttgttctttcacgccgtgacacagccgtacagactgagaacatttcagactattcggaagaacggcagcaaagcatcattaaggaattcaaggaaaccgaccggaataagggctttgatctgcaaaaaggccccttaatgcgcctgactctttttcaaacgggagaaaaccgccatacatgcgtttggactcaccatcacattatgatggacggctggagcttgggcattgtgctgaaagatttcttcagcatgtattatgcgaaccggaacgggcggcctgtaaacctcggcagtccggctccgtacagctcttatatcaaatggctccgaagccggaataaagaagaaacgtcagcgttctggtcgcgctgcttggaagattacggagaagtcgtttccgttccgcaaacgaagaataagccggcgcaaaacggttatgcatctgagcattttcaattttcccttgagtctgaaaccgtgcaaaagctgacagacattgcccgaagcaccggggtcacgctgaatactttatttacgagcatttggggactgcttctccatcgttacaacggcactgaagatgcggtattcggttcagttgtttccggcaggccgtcagctatcgccggcatcgaatcaatggccggactgtttatcaataccgtgccggtaagggtgcgcgcggctggggatatgactttttcttctcttctcaaaaaggtgcaaaaagagtcactcgctgcggaagagcacagctattatccgctttatgacatccaaaacgaaagcggcctgcaaaaagatctattgaaccacatcctggtttttgagaattatccggttcagatgcagactgcggtaaacggctggaagcaaacggaaagcagtgcgctctcacttgaaaacttttcgatggcggaagaaaccaattacgatcttaacgtcgtcatcgttccgggagaagagttttatgtgaaattcagctacaatgcgggcatctacgatcgggaagacatgaaacggatcaaagggcatattctggaggtcatctcctgtgtaacggaagatccggacaggcttttatcaagcatcagtctcgtgcctccggaggaagaagccttgattcattcgtttaacgaaacgaaccgtccgtaccctgagacaaccgttcatgggctgtttgaagaacaggcggcaaaaacgcctgaccaagaggcgttgagatataacggggtaagctggagctacaagaaattaaatcagcgggcgaatcagattgcgcatgcgttaagggaaaaaggcgcacgccccgaccagatcaccgctgttatgctgcgccgatcaatgagtacggttgccgctctgctcggaatttggaagtcgggcagcgcctatatgccgattgatgcggaattcccgcctgaacggatttcatttttactgagagacagtgaagcctcactgctcgtgaccgaaaaggacctgctccccctcattccgccgcatttcaagggcagcgtcgtcatcatggaggaaacggtttcccagcagaccgcaccgcttctgccggtatctgacagcagaaattgggcgtatgtcatttacacctccggaacgacaggccggccgaaaggggtgcttgtacaacacaaagcgatcagcaatacattgcaatggcggcgtgaagaatacgggatgacagaaggggacatagcgcttcatcttttttcatacgtatttgacgggtcattaacgagtcttttcactccgcttctgtcgggcgcctgtgtattgttaactgatgaagatgatgcgaaagacgtcctttcaataaaacagaaaatcacccgccacggagtgagccatcttctgatcgttccgtctctgtatcgcgttctgcttgattcgctgacgaaaaaagatgcagagacacttcgggcggtgacatttgccggggaagcggccactcctgatatcgtggaagcgagccgcggcatatgcccgaatgccgagctgctgaatgaatacggcccgacggaaaacagtgtggccacgacgattctgcgcaacctgcaaaaaagcagccggattacgatcgggcgcccgattgccaacacttctgtctatatgatgcacggagatcggctgcagccggtcggagccgtcggtgaactgtgtatttccggaaaaggtctggcggacggatattttcagcaaaaagagctgacggacaaagtctttacccctcatccgtttcgtgaaggtgaacggctgtacagaacgggagatgcagcccgatttttaccggatggaacgattgaatatatgggacgctttgacgatcaggtgaagataagaggttacagaattgaattaggagaaatcgaaacggcactcagaagtctgtccggggtaaaagaggcggcagtcaccgtgcgcaaagcggcggacggggaacaggagcttgcagcttatgtcgtactggaaaacgcaggtgtgacatttgaccctcatgccgaattggccgggagattacctgcttatatgataccggggagctttaccaaattaacggagatgccgctgtctgtgagcggaaaacttgatcgggccgcacttcctgagccgaaagaagctgagagaaccggtgattatcaagctccgcgcacaatgcttgaaactgagctgctgtctatttggcaagaagtgctgaaacgggaacacatcagtacgagagatgatttcttccaaatcggcggacagtcgctgaaagccgcgtcgcttgtttcaaacatacataaacggctgcaaattgagcttgccgtccgccatgtttttgaacatccgacaatcgagagcatggcccgcttccttgaacagaggaaaagaggagaatatgcagaaatcacgcctgctgtggcaaaggacttgtacccgctatcttttgcacaaaaaaggctctatgcccttcaccagcttgcggcggacagcacgggctatcatatgcccgcttgtctggaactgagcggcagactcaaccgggatcgtctgcatgaagccttttcagcgctgttacaaaggcatgaagcgttacgcacatcatttgttttacgaaacggggagccgatgcagcacatacatgcacatgtcgatcttgacctcacagagattcacatgccatccgggaaccttcttcaagaggtgatggaaactttcgtcaaaccgtttgatgtggaaaaagcgccgcttttgagagtgactttagccaaagtcactgaagaacgtcattttctgctgcttgatatgcatcatcttatcgcagacggtgtgtcaatgagcgttctgattcaagaattgacggatttatacagaggaaaagagttgcggccgttaaaactccaatacaaagatttttccgtctggcagcatgagcggtttgccgctgaagaattcaaaagacatgagcgttattggctggagacgatcggggaaaacattcccgtacttgatctgccgctcgataaaaagcgcccgcagcttcctgatttcagcgggtccgttgttcgaacgcgccttcaaaaggaaacggcggagaatttacgccggctcatggatgagacgggttcgacgctgtatatgattcttttggcaagctactccttgttcctttctaaattgagcgggcaggaagacattgtcgtcggttcacctgcagccggcagaagccgcgctgagcttgacggggtcatcggcatgtttgtaaataccgtggcaatgagaagcaggccgaaaggggataagacattccgcgcttatttagaagaggtgaaaatgctcgccctcggcgcggccgaacatcaggacttcccgtttgaagaacttgcccaaaagcttgatacacaccgggaagtcaatcgcaatccgctgtttgatgccatgctcgttttgcaaaacagtgatgatttcgaagtgaaccttccgggcttagccgtttcttcacatgcagtgaagcatgacatttcaaaattcgacttgacgcttcatgccgaggaacggccggatggctcactggattttcattttgaatacagtaccgcgttgtttgaaaaaggtacgatcgaacggtgggccggtcattttaaagagcttttaggacaaatcgcatcgcatgatgagcggaagctgtctgacattcatttgctgggcataaacgagcggcagatgcttcttcaagcggaaaatcaaacggcggagtatccgaggcatgaaacgatcgtcagtttatttgaagcacaggcggaaaaaatgccggatcaaattgcagccgtcatgtccgacgagcgtctcacctaccgcgagctcaataaaaaggcggatcgaatcgccgatatgctgtcggaaaacggcatccgctccggacagattgtcggaattatgaccgaacgatctccggatatgctgattgggattctcggtattttaaaagcgggaggagcttatctgccgattgatcctgactatccggacgagcggatttcatttatgctgactgacagcggcgcgcgtgctctgttgacgcaatcgggtcttgggatatccggaatggacgggctgccggtattatacatcgataagcctgaatccgtttcagcagacagaacgaaagaaatgataacgcctgaacagccggcttacgtgatttacacatcgggcacaaccggaaaaccgaaaggcgttatgacggaacaccgcaatgtcatcagccttatcacacataaaggactgccgtttgatttcgactctgaagacgtctggacgctgttccattcctattgctttgatttttctgtctgggaaatattcggcgcgctcttatacggcggaaaggtagtcatcgtgccgaaagacacagcccgtgatccgcatttgtaccggcagctgctgcaaagtgaaggcgtaacggtgctgaaccaaacgccgacggctttttccggactcattcatgaagaggccgggcatacggacaagctgaagcttcgatatgtcattttcggcggagaagcgcttcagcccggcatgctgaaaagctggaaagagaagtacccggaaacggagcttgttaatatgtacggtattacggaaaccacggttcacgtcacatgcaaaaaactgaatatggatgatattgagagaaacaaaagcaatatcggcagaccgctggaaacccttcatgcttttgttatggacgcctatatgaatccgcagccgatcggaattcccggtgagctttatatcggcggggaaggcgtcgcgaggggatatgtaaacagggatgatttaaccgcctcccgtttcatcacgaatccgcacgtttccggcatgcggctctaccggacgggtgatatcgccaaaaggctcgcaaatggcgagctggaatatgtcgggcggaaagatgcgcaagtaaaagtcagaggccacagaattgagctgggagaaattaaatcagcgctgcaagagctttcctccgtgaaagaggccgccgtgatcacacgtgctgatcagcacggtcagcactccatttacgcatacgcggtcttacacgggaacgaaaagataaaagaagcagagattcaggcttctctcagagcttttctgccggaatatatgattcccgcccgcttgatagagcttgatgaactgcctctgacggcgaatgggaagctggacgagaaggcgctcccgcagcctgaattaaatgatagccttggagatgatatcagcctgagaaatgaaactgaagaaatgatggctgacatttgggaagaactcttaggtgttgaaggcctcggtcccaatgctcatttcttccatctcggcggggattcgattaaagcgctgcaagtatgtgcgaggctgaaacagcagggctatgaaacgaccgtccgcgagctgttcgagcatcagacactgggagaagtatcgatgcggctccggaaagtccgccgcgtgattgatcaggctcccgtcacgggagacgtgccgctgacgccgatccagcactggttcttgtcgcaatcattgccgcatgatcattttaatcagtcggttatgctccgcagtgcggacagaatcaatgaatctgctatgagaaaagcgttggcacagcttgcggttcatcatgacgcattacggatggtatgcggcacgcaaaacggatcggtgattcaatataacagagcggaaaacctttttgaggaagaactctttacgtttgaaacgcttgacgtgagagggaaagggtcattacaagaggagcacgccgcaattgaacaggcggccgcccgtattcaaacttccattcggctggagacggggccgctcgtagctgtcggattatttcacgctaatgatggcgatcatctgctgctttccattcatcaccttgtcattgacggtgtatcatggcggattttatttgaagatctcaccgcgtgctacaggcaggcgctcgaaggaaaagaaaccgcgcttccggcaaaaaccgattcctatcagacttacgcgaagcaaatttctgattatgcaaaaagccgccggctgttacaggaagcagactactggtccgaaagagaaaaagcggcggtcgaaccgcttccgaaagatgcccgcatctcttccaatcttctgaaagatacagatgtgatgaccgttacattgacaaaacaggagactgagcagctgttaacggaagcgaacagagcatacacaacagagacgggtgaattattgcttgccgcgttaagccttgcgctgaacagatggaccggaaacgagacattcaaaatcagcatggaaggccacggaagggaagagcacttggagcatcttgatatcagcagaaccatcggttggtttacgtcaatttatccggtattggttgacgcaagttttcaagatcaggctgatgacggcgagcggctcggctatcacattaagcggacaaaagacatgatgcgccgcattccgcataaaggagcgggatacggagtgctgaaatatataagcaaactctgggaaaagacggaatccgattctcctgaaatcagttttaactatctgggacagtttgaccgtgaaatccgttccagcggctttggtgtttctcccgtaaaagcgggaaatgaagtcagcccagactgggaacgtccgtacacacttgatatcagcggctccgtatcgtcggaatgtctcagcatgtatgtcgtgtacaaccgttttcagtatcaaaaagaaacgattgaagttttgacgggatattttcatgcctttctcaagcagatcatctcgcattgcacaggcaaagaggagcgtgaatggagcgccgctgatttcagtgacgaggagttaacgctggaagatctgagtgacattatgggggccgtcaacaaactatagaaaaggagtggcgcaatggggcagcaaccggaaatacaagatatttatcctttatcttttatgcaggagggcatgctttttcattctctgttggatcatgactcaagagcctacttcgaacaagcggtgtttacgatcaacggacagcttgaccgggaacgattccaaaaaagtatagatgctgtttttgaacgatacgatattttccgtacgacatttattcataagaatgtggcgaagccccgccaagtcgtattgaaaaacaggcctagccgcgttcagtttcatgatatttctcatttggacgagaaggcgcaagacaaatatgccgaccggttcagaaaagaagataaagataaaggctttgatttgcaatcagaccctctcatgagagtctccattttgaaaaaagcgcctgaacgctatgtttgtatctggagccatcatcatatcgtcatggacggctggtgcttcgggattgtcatgaaggaatttctgatgatctatcaatctctcggagacgggcggctcccgtctctcgagcctgttcagccatatggtaagtatattaaatggctcatgaagcaggatcgtaaagaagccgagattttttggaaaacgagacttgccgatcttgagcaaccggcgtctcttccgaaaaaatccgcggaaccaaatggcgaacttgagcaggcggttttcactatttctgaagagcagacaaatgagctgaagaacattgcggcaagggcgggagcaacgctgaatacagtgttccaggcactgtggggcattttgctgcagcgtgtcagccgctgtgatgacgccgttttcggttctgtcgtttccggccggccgtcggatctcgcaggcgtggaaaaaatggtggggctgtttattaatacgattcccgtgcgggtgaaaagcggttcattttcttttctggaactcgtcaggcatttgcagcaggagacgctgcaagcagaagcgtacagctattatccgctgtatgacattcaggcgcaaagccctctgaagcaagcgctgtttgaccacattatcgtgtttgaaaatgtgccggcccagcgtgaaattgaaaatgtgagtcaggccggttcatttgattttgcggtagaagatttctcgatggaggaagtcacaaactacggatgcagcataaaggtgattccgggaaattctctttatatccgcttaaactttgataccggtatatacgatcgtgtttttatgaagaatattgaaacatttttacggcatatgatgaagtcagtcatttccgaccctgaaatgagcgcctccgagatcgcattgctggatgcgtgtgaagccagaaatatgcttgatgcgtttaaccgtacagaaacggttgaaccgccggctccgacgcttcacgggctgtttgcccgccgtgccgcactttcgccgcatcgtccggcgctccgttttccgggcggcatgctgacgtacgccgagctcgatcaatacacagacaggctcgccgttcagctccgccaaaaaggcgtccgcaaagaaagcatggtcggtgtgctcgctgaacgctcgccggagatggtggtttcagtgcttgccgtgttaaaagcgggcggcgcctacgtgccgcttgacccggagtatcctgaggacaggctgcgctatatgctcgatgactgcggcgcttgtctcctgcttgcacagccggggttatccgtttccggtttttccggcgagacgcttgaagtgtctctttctgctctgacaggcgagacggagacaggggctgtctctgacgaagcggatagcgattcgctcgcttatatcatttatacgtccggttcgacgggaacaccgaagggagtggctgttgaacaccgtcaggccgccgcctttttatcagggatgcaagggcagttcccgttgacggaagaggatattatcgtgctgaaatcatccttttctttcgacgcttccatctggcaattgttttggtggacgatgtcaggcgcctccgtgtatctgcttccggccggctgggagaaagatcctgtgcggatgattgaagcgtttgcctcagaaaaggtgacgaccgcgcattttattccggcgatggtcaacagctttttagacgcgctggaaacagagcctgcggaaacaagaacacgcctcggcagaaccttgacacgcgtgtttgccggaggcgaagctctttcaccgcttacggctgcccggtttgccgatcttctgccggagaccgtgctcattcacggctacgggccgacggaagcgacggtggatgcggcgttttacgtctgtgaccgaaaacgggacagcggacggacgcggcttccgattggtaaacccgttccgggtgcccgtctgtatgtattagatagcggaggaaccatccagcctgcgggcgtggcaggagagctgtacatcgcggggacaggggtggcccggggctatctgaaccggcctgagctgacggaggagcgctttctcaatgatccgttttacccgggagaacgcatgtatcagacgggcgatatcgcacgctggacagaagacggcctagtcgaatggctcggacgttcagacggacaggtgaaagtccgcggctaccggattgaaccggg

SEQ ID NO: 11 - DNA, 24897 bp, Bacillus subtilis
ttacgctggctgctgaagacttgcccggcgggaaaacgggtgtaaggctcaaacagatcgtttggctccgtccggtgacggcgctttctgaaggagtgacgcttcatgtaaagcttcagccggaagaaaacggagacattgcttttgaagcgtatgccgaaggagaagagccgcttgtctttttccagggaaaggccgtgctcgaagagacggagcgtgctcckgtwctcgatgtggaagcggttcaggcgcgctgcagcggccggcgtatgtcaaaggctgagtgctatgaagcgttcgacagcctcggcatcacctacggaccgtckcatcaggcgcttgacgccgtctatgccggaarcggagaagtgctcgcgaagctcactcttccgccgtccgcccgcgaagaaaaggagccgttcatcctgcatccgagcatgctggacgccgcccttcaggcttctatcggtctcgtgctctcagacggttccgcgtccggacggccgtttctgccgtttgccctgcaggatatgcaggtgttttctgcgtgccgtgagacgatgtgggcggtgctttcctcagcggacggcgcctatcatattgaactgtgtgatgaaaacggcgcggtatgtgtccgattgacggggctcaccgcccgttttctggaagaggaaacggaggaaaaaccgctcttgcttcagccaaagtggcaggaatcaccgccggrtgaaggcggcggacaagaagagtctttcagatacgtgacgctgtatggcggaatgaacgctgaggacataagcggcgccgtatgtgcggctgackgcgaaggtccgattgaagaccgttatgacgcctgcgcggcggagctgtcagcgatcgtcacgcgtcttatcaaagaaaaacagaagaaaaaaacgctgatccagcttcttgtccccgacaggggggaagacaatgtattggcggggctggccgcttttctgaaaacggctcaccttgaacatccgaagctgtacggccaagtcatccaagccgatccgggcgagtcagcctcggcgcttcttgccaagctgaaagaaaaccgggcgcatcctgaacaagcggaaatccgttatgaagccggcaaacgtctcgtcagaaactggcgtcacctgcctgcccctcaaagcggcgccgttccgtggaaagacgaaggggtttacctcctcactgggggagcgggcggcatcggcctgattttcgctgaagaaatagcctcccgcgtcaaaaatgccgttctcatattaacggggagggcggaagcgcttgatgaagagcgctccgcccgcttacggcgcttggaagcgtcgggtgcccgcgtattgtatcaatcggttgacgtgacaggcagggcggcggtcatcgccctcgtccgcggcatacaggaggagcacggaacactcgacgggatcattcacggcgcaggcgtgatcgctgacaactacattctgaaccagacagaaaacgaacggaagaccgtcatggmgccgaaggtgaaagggcttatcaatcttgatgaagcagcgaaagatgtgcggctggactttttcatyctgttttcttccttggcgggaggtatgggaaatccggggcaggccggttatgcggcagccaacgcatttatggatgtttatgcagcccgccggaaccgtctcgtgcgggacaacaagcggagcgggcagacyctgtcygtcaactggccgctttgggaagaaggcggtatgcgcgtggacaaagagaccgaacggctgatgtatgaacagaccggaatgaaagccatgcgatcggcctcaggcatccaagcgctgtacgccgcttttgcctccggagaacaccaggtcatggtggcagaaggcgacgaaaaacggattcgaaaaaacctgatgcctgaaacgccggaaccgtcccgtagcattcatgtgtcaaggaagacgcccgtccatatgccgaataaagtacaagcggaactcaaacatatgatatcaggcattctgaaggtgaaagaagacgagatagatgctgaatcagagatgagagattatggctttgattcggtttcattcacgcagtttgcaaatgaactaaataaaatgtatgggcttgaactgacaccggccgtgttttttgaatacccgacagtctttcgttttgcccaatacttgctgacggaacatccggatacattcggctcacaggcagaaacagaaacggagaaaccggttgtgcgtaaaaaaatgaagacggagccattcttgattccgtcccgccttcctaaaacaaaaaccgcagctgcacctgagcccgtggcgataatcggaatcagctgtgcatttccaatggctgaaaatccggaaatgttttgggagaatttagccggagaaaaggactgcatttctgaaataccgccggagcgctgggactggagacagtattacggagatccgcagaaagataaaaatgcgagcaatgtaaagtggggcggcttcattgatgaaaccgctcaatttgaccctttatttttcggtatttctccgcatgaagccgaaatgatggatcctcagcagagacttttaatgatgcatgtatggaaagcgattgaagatgccgggtgctctgccaaaagcctgtcaggtacaaatacaggcatttttgcaggcacgacaaacagcggttacgcccaggaagcttcaaagttccatatagagattgagggttcttccgccgccgggacggttccgtcaatcggtccgaaccgtatgagctattttctgaatatacatgggccgagcgaaccgattgaaaccgcctgttcaagctcattggtcgctgttcaccgtgcggtcagggcaattcaggccggagactgcggcatcgcgattgcaggaggcgtcaatgctattgtatcgccggatatgcatatcagctttaataaagcgggaatgctcagtgaagacgggcgatgcaaaacattttccgatcaagcggacgggtatgtcagagctgaaggtgcgggcatgattgttttgaaaacattatccgatgcggaacgtgacggcgaccgtatttatgctgttattcgcggaacggcggaaaatcatggcggacgggcggcttcccttacatcgccgaatccgaaagcacagacagaagtcatgataaaagcgtatcagcaagcgaacatcgacccccgtacagtgagttatattgaagcccacggcacgggaacggcgctcggagatccgatagaaatcaacggactcaaagcggcttttgcagcgctttatcagaaagccgaagtaacggcacccgatcagcctcattgcgccatcggttccgtcaaaacgaatatcggccacacagagcttgccgccggcatggccgggcttttaaaaattattttgcagatgcagcacaaaacgctcgtgaaaagtctgcattgtgaaaccgttaatccgtatatcagcctcgacggcagcccgttttatttcgtccgcgacactcagccgtggaaagcggcgactgatgatagcggaaatgaactgccgcggagagcgggtgtcagctcgttcggatttggcggtgtcaatgctcatgtcgtgctcgaagaatatgtttctcctgttgaagagaaacaatggacggccggtgaacttcagccgtccttattcattctctcggcaaagacggcggaacagctgaaggaacgtgcggaacagctgtgcagatatttggaaaagacacattcagctgacggagctcttgcgggtatcgcttatacgcttcagcttggccgggatgaaatggaagagcgccttgccgttattgctgaaacaaaagaagagcttacgaacgcgctgaatgatttcctcagcggcaaggagacggggcagaatttctttacaggccggaacaaagcgatgaaacagctgtttacagagatgacagacaacgcagaaatgagcgggaccgtagatcaatggattgaagcaggaaagtatgcaatgcttgcaaaattatgggtgcaaggtttacatgtcgactggaataaattatatccggacgaaaggccaaaaaaagtcagcctgcctgtctatccttttgcgaaaacacattgctggataccgcacagtgcgcagcatataaggcaccgggagacttatgagactgatacgtccccgcttgagacttatgagcgcctgcttgatgatttggagaaaaacgaaataagcatagaaaccgctgtaaaaagaacgatcggtttttacagggattagcgtaatggaggaaaccatatgaaagagtttctgcaccgggttttttctgacgtcaaaaataaaaaaatgacaaaacaggatgcgatcggcattttgcgcgattatgatatgcggatgggacttcgccaagcggattaccttcatccgcttgctcagcagcatatttccgatgaaacgggacagggattctcggcagctttcagcggccgggaattttttctcgctgatgtttctttacagcgtaaaaagcttatgcccggagaacttcttttggaaatggcgagagctgccgctgttttgacagtaaaggagactgaggctgtccggctgacgcatatcgtgtggtcaaagcccattctgactgaggctgagccgttccatatcgaaatcaggctgatacccgcagagggtgaagccaaaaggtttgagatttataatccattttctgccgatttcagtcatcatgatgtgtacagccaagggatgattcagccagttgatactgcgcccggcatgctggatatcagccgcttgaaggaaaacggcggcttcctgatggatcagcagcaaattgaagccatcactcagaacgataccgttcagtacagtgagcacatgaaaggaattgagcgtatttacgcctcagcaggacggatgctggcagacatatcaattccattgacaaaccaaaaagaatgcgcccgattcggcctccctccctgtgtgatgcaaagtgtgacagaggcatgcgcgctgcttggcggcaaagaatataaaacgctcgccccggtttcattggacgagcttttgttttatgaatcttgtcctgacaaggtatgggccgagatacaagagaaggcggggagcttttatattgatttatgtgacgaagaagggaaaatatgggcttccctgtcggggttgaagctgcagcctgtcatcaagacgggcgctcccggaaaaaccaatgccgaacaccgcagtgaacgtttgtatgaacaaacgcttcttcagctcaaaacgctttttgccctgactgcaaaaattgctgtttccaacatagatactgaagagccgctggaaacctacggaatcgactcagtcactgtgacgaaattgaaccgcgaattgtctctgcttttcggtgacctttccaaaacggttttttacgaatataagacactgggctccctggcagctcactttgtcacggattatccgaatgaatgccgaaaatggacaaatgatgatgagcaccgttcaggcatatcagaacaggttttggcaaatgaagattttccggtgcttccgtcgcttatcaagcgaaagaaacggccttctttttccaatgagaaccagacaaaagaagggattgcgattatcggagtcagcggacgttatccgcaagctgaaacacttgaagagtactggaataacttagcggccggaaaagactgtgtgacggaaattcccgaagagcgctgggaaaaggacaagtactacaaccctgatcccgaagcggccgtgaaagaagggaaaagttacagtaagcggggcgggtttctgaaagatgccgctttctttgatccgctgttttttcaaatttcaccccgtgatgctttgaatatggacccgcaggagcgtctctttattgaaatgtgctggcaggtgctggaggatgccggttatacgaaggaacagcttgagaacctgtataacggccgggtcggcgtttttgcgggcattacgaaaaacgggtacggaatgtactggaaaaacggcggcaccctgcagccgaaaacgtcgttcagttcagcggccaacagagtttcctattttcttaatctgaaagggccgagcatgccggtcgacacgatgtgctcgtcttcgctgactgcaatccatgaagcgtgtgaaaacatccttcgcggcgaatgcgacatggcgattgccggcggtgtgaatgtgtatacgcatccttcggcttatgcggagctcagcgcctatcgaatgctttcaaaagacggaacgtgcaaaagtttcggtgaaggcggggacggatttgttcccggtgaaggcgtcggggccgtgctgttaaagccgctgtcaaaagcgatagctgataaggaccatatttacggggtgattcgcggcactcatatcaatcacggcggcagaacaaacgggtatacagtgccgagtccgagcgcccaggctgacgtgatttccggcgcgcttaaaaaatcaggaatacatccgcggatgatcagctgtatcgaagcccacggcacgggtactgaactcggagatccgatcgagattgacggtttgacccgcgcatttcaaacgaaaacgtcagataaaggcttttgcgccatcagctcagttaaatccaatatcgggcatttggaagccgcggcaggcattgccggtgtaacgaaactgctgctccagtttcaaaaacgaaagctggccccttcattacattgccgaaaattgaatccgaatattgcattcgaccggacgccgtttgtggtgcagcatgaattggcagactggaaacggccggtcattgaggaaagcggagcgcaaaaagagattccgagaatcgcgggaatctcttcttttggcgcgggcggggcaaatgcccacatattgatagaagaatatattgaacctgatagggagatttatgagccattcacagatgaagatcccgcagtcattttattatccgccaaacaggaggccagcctgaagcagcgggcgcagcagcttcttcaagcgatcagaaaaaatgacgtcacagaccgcagcctccgggatgcggcttacacccttcaaaccggaagagaagcgatggaagaacgtgcggcgtttatcgtgacgtcgacagagcagttagcggaaaaactgcagcgttttattgacggcgggagagacggctgcttcaggggaaaaagcaaacagtataaagacattctagccgtttttaaggatgaagatatgcaggaagccgtccgtaaatggatgaaaagaaaaaaattcgcgaagcttctggaactttgggtaaaagggctgaagattgattggtcagagctttataacggcagcctgccgcatcgcatcagccttccaggttatccatttataaaggatcggtattggccggacgatgcagcgccggacaatgttcgtgatgctgaaacacattctgaaacatttcgtgaaatccgctttttacagaaaagctgggcagaaagcagcagtgttccggctaaggaagtgcggggcgtcatcggaatagctgctgatcaccagacaggaaatttagccgttgagctgtcccgttatttccccgagtctgaaatcattgacgctgcatcaccggaaatatccggggacgcggcccggtttggcggtctgattgatgtgaccggatgcgggaaggaaatcaatcatgatgacggctggattcatcgtctgcagtctctcattgacaacagaaaccgcggccgaaagcttcagctgctttgtgtgacaaaggggcttgaaccctttgcaaatgaaacgataaatctctcaggtgcaaaaaaggccggattgtaccggatgctccaaagtgagtataaggatatccgctcgcggcatatggatgcagaacggactgccgaagatcctgagctggcaaaccagatcgcagaggagttttttcgcgattctgaagacatcgaagtgtgttaccgaaacggtgtgcgttatcacgcgcggttaaaggaaacaaacagcttagctgaaaaagaattttcatttccgaaagaccatgtgctctggatcaccggaggaacccggggactcggatatttattcgcccggcattttgccgaacgatacggagtcacgaaactcgtgcttaccggaaaagaaacaatgcctccgaaagcggagtgggatgatcatatcaaacggaattccccgttttccgataaagtgagaagaatcagagagctcgaacaaaaaggtgtccgaacggaagtgctgtctgtatcttccggccctgaatatgagcaggctgtcagccgggtgaaagagaagatgggcccgattggaggcgtgatacacgcagcgggagccgtagatctcgatcatccggcctttatccgcaaaacgagagaacagatgatgaccgtgcttgaacctaaaacagacggactggaccttttgtatcaagcgctgcacaaggagcctctccggttttttgcgctgttttcttcagtgtccggcgtgatgccggaattaggagcgggacaaagcgattatgccatggctaacgcctatatggattattttgcggccgcaaaaggttttccggtgctgagcatccagtggccgagctggaaagaaacgggtatgggcgaatcaaaaagccgggcctatcagaaaagcggtttaaagagcatcactgacagagaagggctgagcctgtttgatgccatcatggcaggcgattgcggatctgttattatgccggccgtcattcacccggaaaaatgggagcctgaccgtctgctgctttcatccggccttactgaaataaagcagcaggaacaggccgatacagaaagcgttgaggagtggctgacgggcatttgctgccgggaattaagactggagccgtcaagatttgaatctgatacaccgtttcaagattacggagccgattccattatgcttgcccaagtgtccagagcgatcggaaagaggatcaaagctgaccttgacccggcggtgctgtatgaatatcctacggttgctgcgctggcgggatggcttgaaacagcatatcccgaaatcaaagatgccgtttcaaaaccggttcagcctgtaattccggacgttcccaaacaaacagcagccgttgtcattcagccctctggagctgcagcggcgcaagacatcgctgtggtcggaatgtcctgccgttttccgggagctgaatcaattgaagcttattggaagctgctgtctgaaggaacgtcggctattcaaagggtgccgaaagaacgctggaaaacggagaaggcggattatgcgggccttttacaaaatgtaacgcattttgacccggattttttccttattccggaagaagacatcaatgcaatggatatccagtcctttcttatattagaagaggcgcttcatctgttcagagacagcggttactcgttacaagaaatgaaaggcaggtcagccggtgtctatttaggaggacgcggcggcagtatgcctgatgaaaaccgtctgaagcatgcaaaaaatccgatagtcgcagccggtccgaattacttagcggccaatctttctcagttttttgatttgaaggggccgagtctcgttttggatacggcctgttcttcagcgcttgtcgggatgaatatggcgatacaggcgctctcttgtggtgaaatcgactcagcggtggtcgggggagtcagtctgctggaatccggtcaaacccaccgaatgttcgaacttcgcaaactgctaagcgaagagcctgcgtttcatatttttgaccgccgcaccggcggcatcgtattgggagaaggcgtcggaatggtgtatttaaaaacagctgcccaggctgtaaaagacggtgaccggattcatgcggtcattaaaggcatttccgtaaacaatgacggcagaaccgcggggcctgccacaccgaatatacaggcgcaaaaagaagtgatggccaaggcgcttgccaaaagcggcagaaaagcggaggatatcagctacattgaagcaaacggttcaggctctgaagtaaccgaccttttggaactgagggcgattgaaacggtgtaccgtatgcaaaacagcgcgccttgcgaattggggtcgatgaagccgaatatcggacacccgttatgcgctgaagggattgccggattcattaaaacagtgcttatgctctcgcgccgaatgcgtgtgcctttcctttcgggcaaagagccgatgacgcattacgatctgtccgcctcgccgttttatttttcgcacgttctgcgtgaatggacggattcaccgcggattgccgccgtcagcagcttcgctgacggagggacgaatgcccatgtcatagtggaagcttgggagcaagaggcgtataccccggttagaaagcctttgccgagacaggaattaaaacgccggccaattcgttcggacaaagccgaaagcctgcatgaaaacacacataagtcccgtccgaatacgttttggaaacaaatgaagacttactgattgcgctgaaaattgaacgtcgatatggaggaagttcatatgcaagagcagcttcttattaacaatcagcatcccgttctgaaacatcataaagcctatggaaaggaactgctgccgggtctggcttatattgacctgatctatcagactttcagagaaaacggtttttttcatgccggccttgaactcaggcacttatcgatttttcaccctttagctcctgaacagggagaaacaatcctgctttccgttgactgtacagagaacggcgaagggcagtggaaggtagaggtgaatgggcaaaaacaaggtgacgaagcagcagagacaaagatatatgccgcggcgcaaatgcattccgtcaagcccgccggcttccaagagagcgtccggatggatgccgtaaaacaaacggcggcagaaataccgcttgaggacatttacgcggaatgcagggatcaagaactggttcattcaggaatgatgaaaggctgcggaagcgtctaccaaaatgaaaaagagatttatattgatctgtcggtgcaaaaggatcacctggaacatgcagaagaggcgatttttcatcccgcattgatagatgcgagcagcatcggctccaatgtatatctcgctcctttgacgagggaggaggggcaattatttctgccgctgttttatgaatcgttttattgcaccgaattgctgcagacaacatgtatcaccaagataaaaaaagaatccgtcacccgtaagaaagatctcgtttacgtgacaatggagtttttcaatgaggaaggcagaaaagtcggcgaactgaaaaacttcgccaataaactggtgagggacccggaactgatcaatcagaaacggcaaaagaaagaacctgacgggcggaatgccgtcccggctccgcaagcggaaccggcgccttctgagccccgccgtacggaggcttccgccggccttactgaacagtgcatcctttatttaaaagaattgcttgccgcccgattgaacaaacctgtgaaagagattgacccggatatcggctactatgaaatggggctggattctccggggctgttggacatggtaaaggaaattgaacgaaaaatcggaacgcagcttctgccgacactgttatttgaatacacgacaatcgcggaattggcgggatatttgtgcgaacattacggagccggtttcggccatgctcaaagcgggcattcaagtgctgagcctttgcaccgggaaaaaaagaggacgacccaaatccgcgtgaaaaaatcggcgtcagccggaacgcagaatggagatattgcgatcgtcgggatggcgggacggtaccccggcgccaaaaatcttcgtgaattttgggcaaatttaaaaaatggagaaaacagcgtaacggaagtgccccgttcccgctgggatacgaggacatatgagcatttgcggtcgccgtccggcaagccgatttccaaatggggcggttttatagacgatccggattgttttgatgcgaaattttttcggatttctccgcgggaggcagaagctaaagatccgcaagaacgattgtttttagaaacatgctgggaaacgattgaggatgcgggctacaccccggaaacaatcgttcagccgaaagggccgaataagagaatgaacgtcggtgtgtttgccggggtgatgcatatggattattctctcgccggcgctgaagctgcggctaaagggctggtctttccttatcccttgaactatgcgccgatcgcaaaccgggtttcatatttttgcaattttcacgggccgagcatggcggttgacacggtgtgttcgtcatctttgacggccgttcatatggcggcggaaagtctgagacgcggtgaatgtgaagcagctcttgccggaggcgtcaatttatcattgcacccgacaaaatatatcacatacggcttgatggatatgcattcgagtgacgggctgtgccgcacgttcggcgaaggaggcacaggctatgtctcagctgacggcatcggagccgtgctgctgaagccgctccacaaagccgaagaagataaggatcatatttatgcggtgataaaaggcagcgccgtcaatcacgtggggaccgtcagcgggattaccgtgccgagccccgtggcgcagggggatatgatagctgaatgtcttgaaaagacggggatcgatccccggacgatttcttatgtggaagcgcacggaaccggaacttctttaggagatccgattgaaatacaaggtcttgttaaagcttaccgcacgtttacggaggatcggcaattttgtgcgatcggttccgttaaatcgaatatcggacatgcggaatcagctgccgggatcagcgggcttcataaaacggttttgcagctgtttcacaaaacgcttgtcccttctttacactcagagacgattaatccgtatctccgtttagaggactcgccattttacgtgcagcaaaaaaccgagtcatggaaaaagccggcgtatacagagaacggccgtgaacatgcctgcccgagacgcgcaggcatcagttcattcggggcgacgggttcaaacgttcatctcattttagaagagtacaggcctaaaaaccccggtattacggaggatcaagagagaccgtatatcgtgcctctgtcagcgaaaaatccggagcggctgaaggaatacgctacccgcctgctgatgtttctcaaagataaagcgcttgaaggaagcggtccgcttcatgacaaaatagatacaatgcaaaatcagctggaaaatgcgttgcgaggtgttctggccgaagttctgcatgttgcggccggctcggtagatgatgaacaggattggaaggaattcggcttggatgtcatgcagctgacacagttttctgagctgatgacggatcaatacgggctggcaatagacatgactgatctcatacagcatacttctgtccggactttagcagaatgtcttacaaacgatgagaaacataagaatattctttccggtcttttcggtcagtccggcttagataagcagcctgatgaatctttttccctgcggtcactggcgtatacgctgcaaacgggacggctggcaatggaagagcggcttgtttttttagtgaacgatcaagcagacctgatcaggaaattaactgaatttacagaacaaaaacggcagattgacggctgctttcaagggcggtctgacagcggaacggaaatcaggggtttcctgaacgatgatcaggatacggaggagctgatccgaaaatggatggacagcggcacttacaaaaaacttgcggagctgtggtcaaaaggatttgagatagactggacgcggctgtatcgggaggagaaaccgcgcaggatgagtctgccgacgtatccgtttgcaaaggaacgatattggataccggagcccgatcatcccgtcacttccgtaaatacagaaagcaggcttcacccgctgcttcaccgcaatacatcagatttgctagaacaaaaattcagtacgatactgaacggagatgaattcttcttagccgatcatatcgtccgaaacaagcgtgttctccccggggcggcttatcttgaaatggcgagagccgcggctgaactggctgccgcgccgttagccgctgaatacacggctaaaaccggcatttcgctgcggtatatcagctggatacgccaggccgttcacaaaaaagagacgctgcgtatgacgacagggctttctttggaggataacggcaatgtttcatttcaagtgtacagcagtgaaaatgattcagacatttattgtgaaggcagtgctgtgattgagccgctgtctgaggcgccggttttgcatattgaacagctgaaagcgcgatgccgcaaaaaagtgctgtcaaaagaagactgctacgtggcgtttgcaaaggcggaaattgtatacggaccttcacatcaaggaattgatcatatttattgcggggaaaaagaagccttggctaaattggtgctccctgcttccgtttctgatgaggccgaacagtttatgctccatccgagcctgattgattccgcttttcaggcggccatcggcgttatgaatgaagatcaagcgggttatccggagcagccgttaatgccttttgaattgcatgaactgaccgtttttcatccgtgcagtccgaacatgtgggctgccgtgtttgtgacgcatgacacaccggctgtgcgaagaatggacattgatatatgtgatgaacgcggcaatgtgtgtgtaaggataaaaggattttctgcccggatggccgaaagtgcgccggccgtaaccgataataagcaatacgatctgccgggtaaccttaccggagccgtcaaactgatgcaggtatgggacgcggaaccgatagacaaccaaacccgcttccccatttctgaagcaaaagctgtcatcataggcggtacagacgggcaggcggacgcggttttacgattgtttcctaaagctgtgcgatttgatatcggccaaagtgcttccgttgaagtgatatctgatcggctccgccgtctcggtgagattcagcatatgatctggtttgcccctcagccggctgattctgacagccatgatcaaaaaagcggggtgctgcaaattttcagagcggccaaagctcttatcggtctcgggtatggaaaagagcagctcgggatgacggtgattacgcaccaagcacagcctattacccaatatgatgaggtgcgtcccgctcattccagtgtgcacggtttcgtcgggtctctcgctaaagaacatccgagctggcacatccgtctggccgatcttgaagacgggggggattttcccgcagaagacatattcagcctgccccgcgaccgtacgggtaaagcatgggtgcgcagacatcaggaatggtaccggcctcaattgcttccggtccaaagcgggccgtctgaaagtgttccttaccgctatggaggcgtatatgtcatcatcggcggtgcgggaggcatcggcgaggtttggacagattatatggtgacgacgtataaagcccgagtcgtctggatcgggaggcggccgctggacagccggatacgccaaaaaatagaccggtaccggccatcaggcccggctcccgaatatatagccgcagatgcttctgatcttccatcgcttcagcgcgcctatgaacagattaaaaacacatacggcaccatcagcggcgtcgttcattcagcgatggtatttgcgaatgaaagcgtaaaagatatggaagaatcacagtttcacgccagccttgcggcgaaagtggatatttccgtcaacattgccgaagtatttgcgaaagagtctttggactttattctctttttctcttcggttatttcatatattaagaatccgaatcaaagccattatgcggcgggatgcgcatttaaagacgcatttgcccatgagctttccggacggctgtcatgccgggtcaaagtgatgaactggggttattgggagcgggctgacaatcacatttctgaagagtttgacagactgagtgcaatcggtctcgggctgatcagccgggcggaagggatgcaggcgctggaaactctgctgacgcagccgatctcccgcatggggctgatgaagctgaccaagccgattccgatcgagggaatgaaccctcatgaatttgtgactatctgattgcctgtcaaattgacggagcaaatttaattttcttaggaggataaggttttgggtaagggagacaaacaaaaagaccgtacacagttatccttaagaacagaaataagcaatcaaatgaaagaattgaatcggcttttgctgcaagtgctgcgggtgacgctgcgttcaatgggtctgaccggcgaagcgccggcagcttcctgtctgcctttatatgaacgctggctggaagaaagcatccgtcttttagacagcgattttaaaagcggtgaaacggccgcggtttggaaagagtggcataagaagaaaaacgaatggctgaaagatccggatatgaaagcgcaggttctgctggcggataccgtcattcaagctttgcctgacattttaacaggcaaaataaaagccactgacgtgatgtttcccgattcttcaatggagcttgttgaaggaatctataagcataacattctcgctgattattacaacgatgtgctggcaaatgaagcgtgtatgtatgtggaaaatgtaatgaaaaacaatcctgatgcaaacatccgtctgctggagatcggagcgggcaccggcggaacgagcagcacattgtttaaaaagctccgcccctatcaaaaccatattcaggaatactgttataccgacttgtcaaaagcttttttaatgcatgccgaaaaggaatacggcgcggacaatccgtatttgacgtatcagctgtttaatgtggagcagcctgcggcgggccagggattacatctgagaacctacgatatcgctattgccgcaaacgtgctgcatgccaccaaaaatatccggaaaaccttacggacggcaaaagccgtattgaaaaaggacggtttgctgctcgttaatgaactgggcgggcatacgccgtttacacatgttacattcggcttattagagggctggtggctgtacgaagacgaggcgctgcggattccggggtgccccggtctttatccggaaacatggaaatccgttttaatggctgaaggttttcattccattcaatttccggctgaaaacgaacgtctgcacacccagcagattatcacggcgaaaagcaacggagtcatcaggcagagcagggaagcttacaccgcgcaaaagcgccaatcaaacgtaccgcaaacatcctctgatcgtcagctccccatcaaacaagcgggagaggggctttcggaaaagacagcggcttttctgataaaggctgcggcaaaagtattaaaaatgccggcagaagagataaatccgctggctcctctggatgaatacggcattgactctattctgatcgttcagctgacgaatgagctgcgggatctcgtccctgatatcagcagcacgctgttttttgaataccggacgataggagagcttgccgcattcttggctgaaacgaaggagcgcgaactgcatgcgcaattttctgaagaagtccctcatactgaagcggcatcatccggctctttgcttgaaaaaagcacagagtacctgaaacagatcgtcagcgccatcttaaagatgccgattgaggacgttcaagcccatacgccccttgaagaatacggaatcgattccatcttaatcgtacagctgaccaaccgcgtgcgggaagacgtccctgatatcagcagcactttgttcttcgagtatccgacaatcggcggattagcggactatctcgtcagctcaagacaggaagatatggctgggattttcaagacaaataaagaagccgaaaaggcgccgcacactttacagaaaaagcaaagccgtaaaaaaagcgccggattgacgaagcgccaagcggcatctttttctgaaaaagcgccgcccgcttccgaaccgccgtcaaaacactttgaagtggcaattgtcggtcttgccggacggtatcccggagctgaaaatgttaatgagttctgggaacggttaaagaccggtgaacacggaatcaccgaaattccgaaagaccgctgggattggcgggactactatgatgagacaaaaggtaaggaaggccggatgtatacaaagtggggcggctttttaacagatattgataaatttgatacgctgttttttaaaatctccccgaaagaagcggagcgcatggacccgcaggagagactgtttctggaaaccgcttatgcggccctggaggatgccggatatacccctgattcactatgcgccggtaaaaaggttggtgtctttgcgggtgttatgaacggcaactatccgacaggggcccactaccactttatcccgaaccgcgtatcctatgtgtttgattttcacggtccgagcatcgcggtcgataccgcatgctcctcatccttaaccgccattcatctcgccgcagaaagcatcagaacaggtgcatctgaatgcgcgattgccggcggcgtaaacctgattacagatccggttcattatatcggactttcttctatgagaatgctgtcaccgtcaaacgcgtgcaaagcgttcggtgataaggctgacgggtttgttgacggagagggcgtcggctgtatcgtgttaaagccgttgaaaaaggctgttgaagatcatgatcatatatacggtgtcattaaaggaagcgctctgaacgccggcggcaaaacgaacgggttcaccgttccgaatccgaaagcacaaggagaagtgatcgcagacgcgatggagcgggcagggattgacccgagagcaatcagctatctggaagcccacggcaccggcacttccttgggagatccgattgaaatcgcagggttaaccaaggctttccgccgctatacggatgcaaagcaattttgttccatcggttctgttaaatccaatatcggacacctggaaagtgcggcgggcattgctgcggtcaccaaaattcttcttcagatgaaacacggatatctggtgccgtcgctgcattcaaagcagctgaacccggaaattgattttgaaacttctccttttatcgtgcagcaggaaacagcggaatggagacggccggtcatagaatctgaaggagtaacacgggaatatccgagaatcgcgggtacatcttctttcggagcgggcggtgcaaatgcccacctgctgatagaagagtatgaaccggctgaaatgacttcagcagactccggccgtccggcgctttttgttttatcggcaaaagataaagaccgcttgcgcgagcgggctctgttgctgtcggatgccgccggaaacggaacaattacagatgcgaatctgcttgacgcggcatttacccttcaagtcggcagggtcccgatggaagaacggctggcgatgacagcggactctgtttctgaattggaacagaagctgactgcttttctgaataattccggttccgtaagcggggtgtttacgggccggagtgatagtgctgtcacggagacggaaggcactatcagtgagtggatggaaaaacgtcaatttgacagtcttttgaatgcctgggttcacgggacgcccgtcgattgggcatctttatataaaggcgcgctgccgcatcgtatcagtctgccgtcttatccatttgcaaaagaaagctactggatgaagcgggaagaaccaaaaacaggaacaactgaatatgtgcatcctttcctgcatgaaaatacgtcaaccttggcggagcaaagctatcatacatcttttacaggccgggaacacgttttccaggatgtgagcggggagcgggttttgtcggcagccgtttatttagaaatggcgcttgcggcttttcatcatgcggcagacagctctgaagaaaaagagatatggatccgaacggcggcatggactgacccgattaccggcggacatcacggtgcgggcgtcaatctctcccttctgtctgaagacgaggaaggcatccattatgaaatatacagtgacgaagagaagctgcatcattatggaatcatcggacaagggaacatacagccatcccgcgtgcttgatattgcctccttacaaaaagactgccgcccgctgtcattcgattatgaaacaccaggcacatcaggtgtaacgatcagtaaggagttccgcaccgttgaaaagctttatgcgggagaaagtgcggtttgggcgaagcttgctctcacagatgaaagcggccgtaatccgggatatcatctgccgccggaatttctggacgcagcttttcatgtcctggcaaaaacggagccgtcagtccatatcgtgcctgaagcggttgaagaactgcgcgtcatgcgtccgtgctcatccggcatgtggatgtatatgaataaaaagaatcaaaccggctgtgacattcaattttgtgacgaaaccggcactgtctgcgcagaaatcaaagggataagaatgagacagccgtctcagcaggatcacgggcaagaggaacaatccgagatgatgatatttgaagaaatgtggacgcagcagcctctgaagaaatctattcatgaagagctgaaaacggtcatctgttttcttacgggagaagctgccagaaagcatgcttatcagtctttacaaaccctttatccgggagccggcgtgttttttatttcacagggtgaggaaactcaaaagctttcaaacacgcattatcaaattaaaatcactgacggacaagcatatcaagaaacgtttcggcatattgaaacggctgcaggcaaagcggatgccgttttatatggatggccgcttgaagatgaaaaggccgtgaaagactattccattctgtatcatgtgatccgcgcagctgcttctttgcgttctaaaccgaggcggatccttctttccgctcagtgcgggagcgataccgatatcagttacgccgagtcatggatcgggctggaacggtcgctgaaactgatcttgccggagacggatacggccgcggtttattttggacaaaaaggaccgtttgaaaagctgatccataacgtatgtgaagaacttcacagcgagtcgttcggcagtgtcatgtacagtggggaaatccgccacgtcatggaaatgaagcagacggatatcgcccctgttgagaagcgtgtgataaagagcggaaaaacgtacttgattaccggcggatgcgggggattaggcttgttatttgccggatattttgctgaaaaaggaccggttacgctcattttgacggggagatcagcggcagacggcccggtgctgaacaagataaagagattggaagcatcaggcgccaaggtgttttacgtgcaggcggatgccgcagatcaggctcagatggagaaaggtttgcaagaagcgaaagagaaaggatgcgggccgattcacggtgtcattcacgctgcaggtcttcaaggcactgaaagcattctggagaaagatctgcaaacctttcagcaagtcttatcgccaaaagcggacggcaccgcggtgttagatcaggttctgtcacgggagccgcttgacttcttctgttgtttctcttcttcttcagcgattttaggagacttcggttcttgtgactacgcgatggggaaccgcttccaaatggcttttgtccgtcaccgggataaacttgtgagcctcggactcagaagcggcaagtcacttgcaatcaattggccgctttggaaagaaggggggatgcatgtcggcacggcggaaagcaccgatatgtatttaaaatcaagcggacagcgttatttatacactgaggaaggactcgaagcttttgaaacattgttagtccagccgtccagccagtatctcgtcctggccggttttccgtcgagggccaaacgcttcctgcagatagatcaaggcgaacggccgatttcgggttctgtaaacaggaacgtcccgttttcaggaaggcggagtgaaatgaaaggctttacactggaagaatgcgtaagctgggatgtgaaagaactggcggcggggcttttgaaaatagacaagaacagactgacggacgctgacaatctggctgatttcggctttgattctatcagtttggcggaattcgcctcttctttgtccgcccattacggaattgaagtgacaccggccctgtttttcggacattccacactggagaaggtcgtccgctattttctgacggaacaccagtccgtcatggagcatgtctatgaagaaaagaaacctgaatccgcagatcaatctgtctttgaaaaggcaggaacggaaaagcgaaagaagcagaggggaagaaataagctgaacgccggaaccgagggcagtcaggcagctgattccattgccattatcggcatgagcggccgatttcctcaggcgcgcacggcggacgagctgtgggacattctgtttcaggaaaaggacgttgtcgcaccggtcgcaaaaaaaggcttcacaagttcaaaatggaaactcggcgctgtaccgggggcggacgaattcgaccctttattttttgaaatatcgccgagggaagctgaaacgatggatccgaaacagcggctgcttcttcaggaagcgtggagggcccttgaggacgccggctacggcgccagtcacatcaggcagcagacgatcggtatgtttgtgggggcggaagaaggagattatcaccttttaacacgggacaaaggcaatgtcacgtctcatcataacggtattttggcggcgcggctggcttatcacttgaatttatcaggtcctgtgatggcgataaatacagcatgttcttcggggctcgtttctgtccatcaggcggtattaagcctgcagaataaagagtgcacaacagctgttgcggccggggtgaatatcatgaataccccggacttttttgaaacgatagataaagccggaatgctgtcggaaaacgggaaatgcttcgcgtttgataaaagggctgacggcatggttccgggggaagcggccgcggcggttgttctgaagccgctgagagaggcggaaaaagatggtgatccgatttacggggtgattcgggcgagcggcatcaattatgatgggaaaacaaacggaattaccgctccgagcggcgtcgcgcagacccggctgcttacttccgtttatgaccggggccgtatcaaccctgaagatatcgaatatatcgtcacacacggcacaggtacaaaactcggtgatccggtggaaattaacgcgctttatgacgcattttctgcctatacaaacgaagaagctttttgcgcgctcacatcaattaaaaccaatatcggccacacgtttgccgcatcaggcattgtcagtttaatcagtcttttacaggcgttctcccgtgagatgattcccgccagtctgcattgcagcggggaaaaccgctatatcaactgggagaagagtcctttttatgtgaataaaacgggtaaaccgtggccttctctgccgggtaaaaaccgaatgggggcagtcagcgcattcgggatgagcggaacaaacgcccatgtcgttatggaaagctataagcgcagcgcttcacctcatcgtgatgcccctgcatatttacttactttgtctgcaaaaacagaggaggcccttcaggaaaaaatcgaagatatgatcacttgggcggaaaatggcggactgaaagaaaatgatctggcccagctcagctatacgttgttaaaaggacggcatcactttaaccatcgcgccgccatcgtggtgcaagatgctgatgacgcagtgtatgtatggaagcaggcaaagcttaatgaacatcatccttatgtgttttcgggaaaagtaccgcagcactttgcagggcgtcagcatattcaggagcacataatagaagtgctcggcaagtgcagcgcctcatattctgaccatagaaaatatcaggagctgttatgcgtgctggcagatttttattgtcaaggttatgaaatcgaaggggacttgctttatggcggacctttgccgcgaatcggcaatctgccgggctacccgtttgccaggcagacgtattgggcgtccgatcgtcttcagggagagcttgaaagccggaattcagacgaacgtgaaaagcttcacccgctgctccatgcgaatacatcgaccttgaccgcccagcgctttacttctgttttttcagggcatgaaccgttttttgccgatcacatcgtcaatggaaaaccggtgcttccgggcgcggctgctttagaaatggcccgggccgccgttacgctggctgctgaagacttgcccggcgggaaaacgggtgtaaggctcaaacagatcgtttggctccgtccggtgacggcgctttctgaaggagtgacgcttcatgtaaagcttcagccggaagaaaacggagacattgcttttgaagcgtatgccgaaggagaagagccgcttgtctttttccagggaaaggccgtgctcgaagagacggagcgtgctccggtac

SEQ ID NO: 12 - DNA, 17478 bp, Bacillus subtilis
tgaggtggaagtgtggcgacacatggagctgacagatactaatcgatcgaggacttaaccaatttgaatgtatgcttactgttatctagttttgagagaacactctcaatggtttggtggcgatagcgaagaggtcacacccgttcccatgccgaacacggaagttaagctcttcagcgccgatggtagtcgggggtttccccctgtgagagtaggacgccgccaagctatattatggtaaaggcagctcatcatgagctgccttttttgtttataagtattgcttcaggaaattagaaacgtaatacggaaatttgcgttccgtgacatctaagaaccggcggatcatcacataatcatcactgacatgctgtgtcagcagttcataccaccactccgtttcatatctcgcaatcatcccgatattgtagaggaccaaataatgaataatcatttccggaagatgcaggaagtgatcacgctgagagggaatgtaatattgatttttctccaagtgaaacaataaatttggcgaagaccaaggttctctgtctatcgggtcagcctcaaaaaccaagtggttatggtctttcctcagaaaagaccactttaaatgatggctgatatattcagcaaatcgggaatcagacatattgtaatgaatcaccgcatgctcaggcactgaaataaggtcatctttgagctctactcgggtcagccaattctttttctcttggaagtaaaagacagtatgcaattcaggtatggctgtcagcaatttcttcattgtgtaccgttcttcctcaagaccagctatcccgaataagtgcttcattacatgaatacataagccattgcgctgcaccttcacttcatcatccctaaaggagtaattttgctttttgcgtttccgggcagtcacaccatgcgcgagtactgaggcgtggcttggatagcttggatctgtggtcagaaggcaggctttcagcaattgtgacatcccgtaaaacaacagaataggcttaatttctaaaggggaaaaagatgcctgtttataaaaggactcggcgtgtttgataaagaatatgaagcgctcactgttcttaaacgcatatcgttttggttcttccatgccgctttctgtatagactttgtttagaaatttctgggaagattctacggaataaaataatgataactctttccactcatgatctctcatatgtatttttaaaccctttcctttatctaaatatttcaactctttttcgcttccttgacatgctgttttctagttgataatctacatataatattttgccgaaaagagggggatttactaatgtgggaaagtaaattttcaaaagaaggcttaacgttcgatgatgtactgctcgtaccggctcaatcagacgtacttccgcgtgatgtggatttatctgttgaactgacaaagacgttaaagcttaacattcctgtcatcagtgcgggaatggatacagtaacagaatcagctatggcgattgcgatggccagacagggcggcttgggcattatccataaaaacatgtccatcgaacagcaggctgaacatgttgacaaagtcaaacgttctgaacggggcgttattacaaatcccttctttttaacacctgatcatcaagtattcgatgcggagcatttgatggggaaatacagaatttccggtgttccgatcgtagataataaagacgatcaaaagcttgtcggtatcattacaaaccgtgaccttcgctttatctctgattattcaatgaaaatcagtgatgtcatgacaaaagaagagctggttacggctcctgtgggaaccacattagacgaagcagaaaaaatcttacagaaacataaaattgaaaaacttccgttagtggatgaccaaaacaaattaaaaggtcttatcacgatcaaagatattgaaaaggttatcgaattcccgaattcatctaaagatgaacacggacgccttattgtcggcgctgcggtaggcgtgacaggcgatacaatgacacgcgtcagcaagcttgttgaagcgaatgtcgacgttatcgtggttgatacggctcacggacattccagaggcgtactgaacacagtcgcgaaaatccgtgaaacatatcctgaactgaacattatcgcaggaaatgttgcaacggctgaagcgacaaaagctctgattgaagccggagcaaatattgtcaaagtgggaatcggacctggttctatctgtacgacacgcgtcgttgcaggtgtaggcgtaccgcagatcactgccatttatgattgtgccactgaagcgagaaaacacggcgcgacaattatcgcagacggcggtattaaattctccggagatattacgaaagcgttggcttcaggcggacatgccgtaatgctcggaagcctgcttgccggtacttcagaaagcccgggagagactgaaatctatcaaggcagaagatttaaagtgtatcgcggtatgggttctgtcgctgccatggaaaaaggcagtaaagaccgatatttccaagaagaaaataagaaattcgtccctgaaggtatcgaaggacggactccgtacaaaggtcctgtagaagaaacagtgtatcagcttgtcggcggtcttcgttcaggtatgggatattgcggttcaaaagacttgcgcgctttaagagaagaggctcaattcatccgtatgacaggtgccggacttcgcgaaagtcatccgcatgatgtccaaattacgaaagaatcaccaaactatacaatctcataattgttacaaataaaaaacatttgacagggtcgctgactctgtctattttttttatatcgagtgtgataaaatttatactgttgtgttttgaatttgaatatgtccttaacggcttaattatagatttaaaatgaatgacggaggtcgtaagattgaacatcacgaaatggaaacagctgttggtgtcattagtggtactggcactggccgcaacttgctttgttccaatgtctaaagcggaggcagccggcaatgatccgattgatgtcaacgcatcagctgcgataatgattgaggctacatcgggaaaaattttatacagtaaaaatgcagacaaaagactgccgattgccagcatgacaaaaatgatgactgaatatctgcttctggaagccattaaagaaggaaaagtgaaatgggatcaaacgtatactcctgatgattatgtctatgaaatttctcaagacaacagtttatcaaacgtcccccttcgaaaagacggcaaatacacggttaaagaactgtatcaggctatggcgatttactctgccaatggagccgcgattgcagttgccgaaattcttgccggaactgaaacgaaatttgtcgctgaaatgaatgcgaaagccaaagaattaggcatgacaaactatgactttaaaaatgccacagggcttgtgaatgaagaccttcacggcaagcagccgcaaggagaaggcgttaaagaagaaagtgaagtttctgctaaagacatggcgcttcttgcagaccgcctgatcactgattatccggaagttctcaaaacaacaagcatcgctaaaacgaaattcagagccggcactgatgatgaaatggacatgccgaactggaacttcatgttaaaaggtcttgtttctgaataccctggcgttgacggcttaaaaacgggttctactgattctgcgggatcttgttttacaagcacagcacagcggaacggaatgcgggtcatcaccgttgtattaaacgcaaaaggcaacctgcataccggacgttttgatgaaacgaaaaaaatgctcgattacgcatttaacggcaatttctcaatgaaagatctttaccctgaaggctctcaagtaaaagggcacaaaacgattgacgttgaaaaagggaaagacaagcaagtcgatattgttactgacaaggcgctttctattcctgtgaaaagcggggatgaaaagaactataaagccgaagtgactttagataaaaaagaaatcacggctcctgtgaaaaagggaacgaaagtcggaacgctgacagttacatacaaaggcagtgacaaagactatggcttcctcaaatccaaagagttcagcgtgaatcttgtaacgaaaaatgatgtagataaagcaaactggtttgttcagatgatgcgcggcatcggcggattcttctccggtatctggaacagcgccgttgacacggtaacaggctggttttaagaaataagaaagagctctgatgaaagttagggctcttttgcttaatatactgaaaaaaccaaattattagtaaaaaaatgatatctatcttattcatctcgctataaaataagaatacccatatgaaatattgtatttctgggatacaataagagatagaaattatctaactatacattgactagggggaccaaataatggctcaaacaggtactgatcgtgtaaaacgcggcatggcggaaatgcaaaaaggcggcgtcatcatggacgttgtaaatgctgaacaagcgaagattgcggaagaggcgggagctgttgccgtaatggcgttagaacgcgttccggctgatattcgcgctgccggcggtgttgcccgcatggctgatccgacaatcgttgaagaagtaatgaatgctgtatccattcccgtaatggcaaaagcgcgtatcggacatatcgttgaagcgcgtgtccttgaagcaatgggagtagattacatcgatgaaagtgaagttctgactccggctgacgaagaatttcatttaaataaaaacgaatatacagtcccgttcgtatgcggctgccgtgatctcggcgaagcaacgcgccgtatcgctgaaggagcttccatgcttcgtacaaaaggcgaaccgggaacaggaaacattgtggaagctgtccgccatatgagaaaagtaaacgcgcaagtgcgcaaagttgttgcgatgagcgatgatgagctgatgactgaagctaaaaacctcggcgctccttatgaactgcttcttcaaatcaagcgtgacggcaaactgcctgtagtgaactttgctgccggcggagtagcgacgcctgctgacgcggcattgatgatgcagcttggcgctgacggcgtatttgtcggttcaggtattttcaaatcagacaaccctgctaaattcgccaaagcaattgttgaagcaacgactcattacacagactacaaactgatcgctgagctttctaaagaattaggcacagcgatgaaaggaatcgaaatctcaaatctattgccggaacagcgtatgcaagaacgcggctggtaaaaccataggagagctggaagcatgttaacaattggtgtacttggacttcaaggagcagtaagagaacatattcgttcaattgaagcatgtggttcaaaaggtgtcgtcattaagcgtcctgaacagctgaatgacatcgacggcttaatcctgccgggcggggaaagcacgacgatgcggcgtttaatggatacgtatcattttatggagccgcttcgcgagtttgccgcccaaggcaagccgatgttcggcacatgcgccggtctgattattttagccaaagagatagcgggaacggataacgctcatttagggctgttaaacgttgtcgtcgagcgtaactcctttggccgtcaggtcgacagctttgaagctgatctgacgattaaaggccttgatgagccttttacgggtgtatttattcgcgcgccgcatattttagaagccggagaagatgttgaagtgctttgtgagcataacggacgcatcgtggctgcaaagcaggggaatttcctcggctgctcgttccatcctgaactgacagatgatcaccgggtgacagagctgtttgtgaagatggcggaaaagcataagcaggaaacagctgtataaaacagttgaaaaccgctgatacttatagtacattataaacacaaataaagatcgaaaagcgttgacaggaagcagtaggaagcctctctttcaaagagagccgatgggtggtgcgaatcggtgaaagatgctgtccgaatccgtccttgagcgaaatgctgaaaacaagtaggcatttacgggaaaaccgttatgtgttaaagcgggaagcaagtgtgagcttgttttcaatcagggtggcaacgcgagagctctcgtcccttttaggggatgagggctcttttttattttcgataaaaacagataggagttgttaggcatgattgatacgaaggtgctgagagccaattttcaagaggtaaaagcgaagctcattccaaaaggcgaagacttatctgactttgacaagtttgaagagctggacgaaaaaagaagagagcttatcggtaaagtagaagaactgaagggaaaacgcaatgaagtgtctcagcaggtcgccgttttgaaacgggagaaaaaagacgctgatcatattattaaagagatgcgcgaagtgggcgaagaaattaagaagcttgatgaagagcttcgtactgtcgaaacgacgcttgaaaccattcttctgtctattccgaacatcccgcacgattcagtgcccgtcggggaaacggaagatgataacattgaaatccgcaagtggggagaggcgccggcattttcatatgagccgaaaccgcattgggatatcgcagaccatttaaacattcttgatttcgaacgcgcttcaaaagtaacaggcagccggtttgtgttttataaaggattaggcgcccgcctcgaacgcgcgctctacaactttatgctggatcttcacgttgatgaatatgattacacggaagttattcctccttatatggtaaaccgtacgagcatgacaggcacgggacagcttcctaaatttgaagaggatgcttttaaaatcagagaagaggattatttcttaattccgacggcggaagtgccgattacaaatatgcaccgcgatgaaatcttatccggtgagaacctgccgatcaattatgccgcattcagcgcttgcttccgttcagaagcgggatctgccggtcgtgatacacgcggtttgatccgccagcatcagttcaacaaggttgagcttgtgaaattcgtgaagccggaagattcttatgaggagcttgaaaaactgacgaatcaagctgagcgggtgcttcagctgcttgaactgccgtatcgtgtcatgagcatgtgtaccggtgatctcggctttacagccgcgaaaaagtacgatattgaggtatggattccaagccaagacacataccgtgaaatttcttcttgcagtaactttgaggccttccaggcgagacgcgcaaacattcgattcagacgcgaagcgaaaggcaagccggagcatgtgcatacattaaacggttcaggtcttgcagtcggcagaacagtagctgccatcttagaaaactatcagcaggaagatggaagtgtcatcattccgaaagtgcttcgtccttatatgggaaataaagaagtcatcaaaccataaaaaggtgcgccctagaggcgcgccttttttgctgcccggtatagagcggcggcattccgggctgtgctttcaaggttaaaaaggccggatgctaaggcgtcttcaagacttacagcgccgggcacgatagaaaatacagctgttattcctgcgctgtaaacatgctcgaaattcttgcctaaggagcccgccaatgcgataacgggaatttcttgagcagatgcgcgttcggcgatcccggcgggggttttgccgaatatcgtttgtccgtcaatctggccctctccggtaatgacaaggtcagcgcctcttatctgatctgagaaggacagtgtatctaatacaacgtcaatcccgctttgaagttctgcttgtaagaaagcgatcagtccggcgcctaaacctcccgcggcgcccgcgccttttacggtatccgcttcgatatcgtgctgacgtctcaatacgtcagcgaaatggcgtaagttgcgatccaatacaactttagtcttctcggacgcccctttttgcgggccgaagacatatgacgcaccgtttttaccggtgagaggattttcgacatcacatgcggcacggatacggatatgtttcagatcaggagagagaccgtttatatcaatagaagctagggtgtgcagagcgcctccgccgtcaggtatctcctgaccttcctcatttaagaaacgcacaccgagcgcgctcgccattcctgttccgccgtcattggttgcgctcccgccaagtccgatgatgatctcacccgccccgcgggaagctgcatctgctatcagttcaccagttcctcttgtcgttgtgttcaacggatctctgagatggcggggaacgagatgaagtcccgatgcttccgccatttcaatgactgccgtgcgtccgtctcccagaagtccatatgcggcgtttaccggcgttcccagcggaccggtcacagtttttttgatgatgcttccgccagtggcatccgtcaaagcctgaacggttccttctccgccgtcggccgcgggtatcttgatatattccgcgtcagggaagactgctttgaatcctttttctatgctgtcagcggcttcttttgatgtcatgctttctttgaaagaatccggtgcaatgatgattttcattatgttctccacctttatgagcaggtatctgtttgaacctattcttgatttttactgtgttttcctgcccgtatggcatactgaggttgaattggacgcaagacttttgtatgatagtaaagctgacggacaagccgtttaagaaatgaaataaaaaatatgaaaaagcgcttgactgaaatttaggtcatgtggtatattattaaatgtcgatacggaggaatacccaagtctggctgaagggatcggtcttgaaaaccgacaggggtgtcaaagcccgcgggggttcgaatccctcttcctccgccatattgattttaaacctaatgaaactcgagcatatattggagattgttttgtccgctgcatgtgatgcagcggattttttatatgcaaaaaaagcgattttctctgttcggggaaaatcgctttgttatttttatttatttctgttttcgttgatcacgtgactgattttttcgatcaaaggttccagtgactgttcatcagcttcaaggtcataatcttcaatgcgtactttcagcacagggcaggcgttaaaaccgctgatccagtcttcgtaccgtgtatacatctcttcccaataggagcggtttgtctgcagctccatctcgcggccccgcttttcaatccgatttataatgttttcaaggtcgccttctaaatagatcaaaacatcaggatgcgggaagtacggcgtcatgaccatcgcctcaaatagacttgtgtatgttgtgtaatctgtcagcgacatggttcctttatcggcatgcatttttgcgaatatgcctgtatcttcataaatggaacggtcctgcacgaatccgccgcctgattcaaacatgtttttctgctctttgaaccgctcagccagaaaataaatttgcaaatggaagctccagcgttcaaaatcgtgataaaacttctctaaataagggttttcatccacttcttcgagtgaggtatgaaacccgagccgttttgctaaagctttggtcaaagtcgattttccgactcctaccgttcccgctactgtgataatggcgttgtttggaatatgaatgtctttcatttaataagctcctttacctgacgggcaattctttcatagtctgtcttattcaaaacaaagtcttcagtatcaccgtcaatggtcagtacagatatatccggatcttcttcctgaagctgtctgatggctgtgtcgtaatctgcaatgagacgttccagatattgatgctcgatatttttctcaaacgggcgcccgcgtttttcaatgcgttgaagcaatgtcggcaggcttgcctttatgtatacaatgatattcggtttcggcaggtcgtgagtgagcagatgataaatctgcttatatttctcaagcttttggccgtgcaatgtacgctctgcgaaaataacatttttataaatatgataatcggacaaaacgggctgtccttgttttaaataatcccgatcggtgtcttcaagctgtttatacctgtgacatagaaaaaacatttcaagctggaaactccactcctcgatattgtcataaaacttatcgagataagggttgtcttccacaatctcattaatcataggaaaaccgagctcttcagaaagcatcgtagcgagtgtcgtttttcctgccccgataggaccttctaccgcgataaaaggggctctgttcattgaaaatcctccttaattctgcaaacatccgtcagctgccggcctttatattgtatcacactctcagaaaagcccatgaaaaaagacgcttccaattaacgaaacgtctctttcacaatatgaaattgatcgttgagcaaaagccagttttgcgggaaagaaaggccgagtttccaatagctgatccctcttaaatgcagttctttaattaaattgaatttcgcttgaatggatcgtgcgtcttcaaaccatacttcatgccgtctctgattttcatccgtgtaacgaaagaatggagcctgggcggtttcgtcatattgaatgtcgactttatggcgtgctgccagagcgattgcctgctgaggactgacggctttagctgtcgttccctgtttaaaaggcagtgtccaatcgtagccgtacatgttctggcccatgacgatttttgaagaaggcatttccgtcagcgcgtactcaatgacatttcttacagggccgataggtgatacggcctgagccgggcctccgctgtacccccactcatatgtcataattacgacaaaatcgacgatttctccatgtgccctatagtcatgtgcttcgtaccatttgccggcctgggtcgcgctcgttttcggagcaagcgccgttgaaatcttccagccttcccgatgaaaaatcgtcctcgcttcacgtaaaaaacgattgtaggcttctctgtcctgtggacgtaaatattcgaaatcaaagtgaatatcgcgaaagccgtactttttagccgtggagacgatttcctgaaagagttttgttttcactgtattgtcattcaagatgagccgcccgagttcgtcgctgaatgcgtcattttcaaggttggtgatgatcatcatcagggtggtgttgtgcctgtcactgatgctttttaaattggtcagaggcggttcctttaaagtcccgttccgctgcacttgaaaactgaatgcgccaaggtatgttaaataaggagaggcctcccttgccgcctgctgcagattagcgcttacgctcgttccccgcggttctatatatgcgtttgattcgatatcgggcttattcgactgctgcggaatgtaaaggcgggttccggctctcaatgtggtgccgggctgaattccgttaaccctcgtaagctccgcggccgatatatgaaatcggccggcgattgccgcaagagtatcaccttgtttcacttcgtaatattgaccctcaatcgggatgacaagggtttgtccgacaaccaatgtatttggattaggcagtttatttgcttccgcaatgacatttgcggcagtccggtagcgcgccgcaatagcggaaagcgtgtcgccccgtttcactatatagatctgaatgaaaaacgcctcctttcatatccgctatcaaatatatgaaaaaaggaggctgatcatgtttatttttcggcggtaatttgtttttccgtggttatttctgcgaagagaacattctccatcatggtcaaagcgaaatcattgtcttcgtcgttattggaagcggtgcagtctttcggaatggtaatgctgtattctctcatataggcgtcgttggccgtgaacagcacacaaatgttcccggcaatccccgtgatgattaatcggttcacttgtaattcggtcagaagggtgtgaagcgccgtttcgtaaaaagcggaatgcttcggtttaatgagaaaataatcatccggctgaggcgaaatatcttttataatgggggcgcttctgttgttgctgcattcctccctgatggcatcaatatcagccttccagagcccgtaatgatcattaatataaataatcggccagttgctttgttttgcatgcttctttaatgataaaatacgggggacaatttgtttggttttttcagcaagacgttcgcccatatcaaattgaaaattgttgatcatatcgacaatcagaagggctgtgttgttaggttcagacaataccggcaactcctttctgctggggtattcctattttaacctttatgagacatgaaaaaacttaagaagagagctcgaacctatgaatgatgaatattatatgagagaagccataaaagaagcgaagaaagccgaagcgaaaggtgaagtgccgatcggagcagttcttgttctgcatgatgagatcgtggcgcgggcgcataacctgcgggagactgaacagaggtcgcttgcccacgccgaaatgctggcgatagacgaagcgtgctgtaagctggggacatggagacttgaggatgccgttctttatgtcactttggagccgtgtccgatgtgcgcgggagccgtcgtgctttcgagagtcgataaggtcgtattcggcgcatttgatcccaaggggggctgtacaggaacgctgatgaacctcttgcaggaagagcggttcaaccaccaagcggaagtggtgagcggcgtgctcggagaagagtgcggagaaatgctcagcgcttttttcagaaagctgcgccggcaaaagaaagacatgaggaaaaagttgtctgagtagtacggttgcattttctgcctgaagcagatatacttatgtgtgcatcatgaatggtgcgcatataaaaatttgatatttattttgccgtgctaagcggggaggtagcggtgccctgtacccgcaatccgctctagcggggccgaatcccttctcgaggttcgtttactgtaaggtctgccttaagtaagtggcgttgacgtctgggtcctgcgcaatgggaattcatgaaccatgtcaggtccggaaggaagcagcattaagtgaaacctctcatgtgccgcagggttgcctgggctgagctaactgcttaagtaacgcttagggtagcgaatcgacagaaggtgcacggtaaatcaatcatcaaatttcagactcacctgtttatggcaggtgagttttttcgtatatgaaaaacgggttttggcgttaaaagcacgttcatgtataataaacatgatgaataacagaggagggcgcatcctgtgggttaccaagctttatatcgagtatttaggcctcagcagtttgaagatgtggtcggacaggaacacattacgaaaacgctgcaaaatgcccttttgcaaaagaaattttctcatgcatatctgttttctggaccgcggggaacgggaaaaaccagtgcagctaaaatatttgcgaaagcagtcaactgtgagcacgcccccgtagaagaaccgtgcaatgaatgtgcggcgtgcaaggggatcacaaacggctctatatcagatgtgattgaaatagatgcggcgtcgaataacggcgtagacgaaatccgcgacatccgtgacaaagtaaaattcgccccgtcggccgtcacctacaaagtatatattatagatgaggtgcatatgctctctatcggcgcattcaatgcgcttctgaaaacgctggaagaaccgccggcacattgcattttcatattagctacgactgagcctcataagattcctttaaccattatctccagatgtcagcgttttgacttcaaacggattacatccaaagcaattgtcggacgaatgaagacaatcgtcgatgcagagcagctgaaggtggaagaaggagcccttgatatcatagcgagtgctgcggacggaggaatgagggacgcgctgagcctgctcgatcaagccgtatcattcagcggcgaggagctgtcggtggatgatgcattgctcattaccggagccgtttctcagcactatattggaaaactggcatctgctcttcaccgcaaacaggtttccgaggcattggaaacactgaatgaattgctccagcaagggaaagatgcggccaaactgattgaagatatgattttctatttcagggatatgctcttgtaccaggccgctcccggtttagaaggagtcctggagaaggtgaaggtcgatgaaacgtttcggaatctgagcggtgacataccggcccccgctttatatgagatgattgatatcctgaataaaagccatcaggaaatgaagtggacgaaccacccaagaatcttttttgaagtggctgtcgtgaaaatatgccagacggcacagcaatccgccggagacatccctgaggtcggcatgctgatgaataagattcagcagcttgagcaggaagtagaaaggctgaaaacctccggtgtgaaggttcagatggaaagcgctccgaaagaagctccgcgtcctcaaaaaggcggaaaaagccattacaaagctccggtcggaagaattcatgagatattgaaggaagccacaagacctgaacttgaacagcttaaaagcagctggggcaagctgctggcacacctgaaacagcagaataaggtgtctcatgcggctctgttgaatgacagtgaaccggtggctgctgctcaaaaggcatttgtgcttaaatttaaatacgaaatccattgtaaaatggttgcagaagacaataacggagtccgtacgaatcttgaacagattctcgaatcaatgctcgggaaaagaatggatttgattggcgttccggaagcacaatggggtaaaataagagaagaatttttaaatgatcaccagcaggaaagtgaaggatcaaacgaaccggctgaagaagatccgctgattgcagaggcgaaaaaacttgtcggagcggatttaatcgaaataaaagactaataagatgaaagagagtgattgaatatgcgtggcggaatgggaaacatgcaaaaaatgatgaaacaaatgcaaaaaatgcaaaaggatatggcgaaggctcaggaggagcttgctgaaaaagtgcttgaaggtacagcgggcggcggtatggtgactgtaaaagtcaacggccaaaaagaagttgtagacattgccattaaagaagaagtcgttgatccggaagatatcgaaatgcttcaggacctggttcttgctgcgacaaacgacgccctcaaaaaagtggatgacatgacgaatgagacaatgggacaatttacaaaaggaatgaacataccgggtttattctagggggataaataaacatgcagtatcctgaaccaatatcaaagctgattgacagctttatgaaattgccagggatcggaccgaaaacagcggttcgtctggctttttttgttctaggtatgaaagaagacgtggtattagatttcgcgaaagcattagtaaatgcgaagcgcaacctgacatattgttcgatttgcggacatataacagatcaagacccttgttatatatgtgaggacacaagaagggataagtctgttatttgtgtcgtgcaggaccctaaggatgtgatcgcaatggagaaaatgaaggaatataacggccagtatcatgttcttcacggcgcgatttcaccaatggacggcatcggcccggaggatattaagattccggagctgctgaaacgtcttcaggatgatcaagtgacagaagttattctcgcaaccaaccctaatattgaaggggaagcaacagcgatgtatatatcaaggctgttaaagccctcaggcatcaagctctcccgtattgcccacggtctgcccgtcggcggtgatttggaatatgctgatgaggtcactctttcaaaagctcttgaaggaagacgtgaattgtaagggaggaaaaggcaaggcatgggttttcttcgcagaaatacattaagaaaagagtttgatgagaagctgatagaacagctctttaaacaaaaagaagaatggaacagacagaagagtctggtcgagaaaagtctcgagccctccgctgaggtattgtttgagctgaaagtcgctgaatctaagtactttttttatttgaaagaagcgaagcagcggaatttgaaaatgagcagatggaagtaagaggtctattctccgggatcttctcataagcttgtactaaacaagcgagggggaagattcatggagccttttttcattatcggtttgattgtcggtctggttgctttgctttttttatggggagtatcttcaaaaccgttaagatggattggtgtgactgcgattaagtttattgccggtgcgattctgctggtgggtgtgaacttgttcggaggcagtctcggtattcatatccctgttaacctgattacaacgggcatcagcgggattctggggattcccggcatcgcggctttgatagtcattaaacgcttcatcatttaatttgtcgattattgttgacatgttggatcaagggtggtattctaatatacgtcgctgatgacgaaacgaattcttaaaaaagaaattttaaaaagttattgacgactttgaagttgatatgttacaataattaagtcgcttcgagagcgatggacaaagttctttgaaaactaaacaagacaaaacgtacctgttaattcaaagttttaaataaatcgcacagcgatgtgcgtagtcagtcaaactactttatcggagagtttgatcctggctcaggacgaacgctggcggcgtgcctaatacatgcaagtcgagcggacagatgggagcttgctccctgatgttagcggcggacgggtgagtaacacgtgggtaacctgcctgtaagactgggataactccgggaaaccggggctaataccggatggttgtttgaaccgcatggttcagacataaaaggtggcttcggctaccacttacagatggacccgcggcgcattagctagttggtgaggtaatggctcaccaaggcgacgatgcgtagccgacctgagagggtgatcggccacactgggactgagacacggcccagactcctacgggaggcagcagtagggaatcttccgcaatggacgaaagtctgacggagcaacgccgcgtgagtgatgaaggttttcggatcgtaaagctctgttgttagggaagaacaagtgccgttcaaatagggcggcaccttgacggtacctaaccagaaagc

SEQ ID NO: 13 - DNA, 3890 bp, Bacillus subtilis
tcctaagatttcttcaaatatgtccgtaatgactttctctgttttagttcttggtggcatatattcctgtcctgctaatgcatttagttctggcagtgcttttgcatccagcttcccatttggagtcagtggcaaggcatcaatctgcatcataaagccaggtaacatatactcaggcagtttgtctctcaaatcatttttgatttcagacatatccagttgctgctcttgatttgtcgggattaggtaggcacatatactcttgtcaccgcctacttccaatgcaacaacggctacatcagatatacccggctgattccttagaacgctctcgatctcgtacaactcgatccgatatcctcggattttaacctgttcatctattcttcccaggtattccatctctccgttaggcagccatctcgccaaatctccagagcggtataacttcccttcgccatatggattgtcgataaacttctccgctgttaattcaggctggtttagatagcctttggctactccgtctcctgcgatgcatagctcaccaggaacgcctacaccacataactccatctcattcagtatatagagctgcatattggcaatgggatgtccgattcctacacttaaacccttatctttttcgctggaatagacatagtcacagcatcctacagtagtctctgtagggccatattcgttatggatcttgacgctttcacccaatagcttctgcgttttccacgccgtatctgtggtgaactcctctccaccgacaatcagcgtttctaaattcggcacatctacgccgtctgcataggtttccagcatttttaaatgtgacggggtaagcttcaggaaggttaccctgttatcttttaaagctgcacgtaacctttcctccgtatctcctccctttaatagaagagatccaccactaatcagcggtaagaacaaggacgttacggagaggtcgaaacttaagcttgtcattaataccgtcgtacaagcttccttctggtattcttgatctgcatacgacaagtaatgatccaagttacctcgtgtaaccgccacgcctttgggctttcctgtcgttcctgatgtgtaaatcaaataggctatgtcacttttttcaacagcacacgctggatttgtctccttctcacccagatcttcaagattcatcgagatgaatgggacttccgtttccatagtcttctctcttgttaaaatgaccttgggtgctgcatcgtttaagatatgctctattcgttccttcggtgttgctggatcaatcgggacataggcggctccactctttagcacgcccaaaatgccaatgatcgtttccgcttccagggtagtcatgatggccactcgatcattgggctgaacacctaacgaaatcagttcccatgccaatgcattggccttgcggttgacttctccataacgaagtactcccgtttcgtattcgattaccgtcttctcgggtgtctgttccgcatgtttctcgaatcgttctactgccgtattattctgtgcatactccgtatgggtatcattgaaaaccgttagtattctttgttgctctacctcactgaccatgtagagttcagacaatttcatttcagggttagcaatcaccctgtccagcaacaccttaaaatgctccagtatgacctgtgctgaagtctcggtaaataaatcactgcaatataccagatctaaagcgtacccctcttcatacgctgtagcttgtaaatccaaatcaaatttggcatcaatgaaaggaatgcccagcatctctacctgtgcttcgcccattgcaagatggatttcctcgttattctgcatggtaaacatcacgtcaaacagcggattgcgtgacagatcacggcgtacttctacttcctctaccaattcttcaaacgggtattcttgattctcatacgcgtttaaggccagctcttttatctcgcttaaaaactccaggaacgttttctcgccccttggataccctctcattgccagcgtattgacaaacatgccggctattgtctcggtgtcctgatgcactcggcctgagatgggtgttcctaccacgatatcttgttgcctgctgtatttatgcagttctatcataaatacagccagtaaggtcatgtaatctgtcgttccctgttgtttatttatattttgaatgccagctttctgctctcggctaagctgaacagacacttgggctcctttgtagctttgggttttcggacgtggatagtccgtcaccaaatccaaaaccggtgcctcttctttaaatacttctttccaataatccctctgactctccagatttctagcacgcatccattcactataatctttgtattggagttcaagtggttgtaactcttcaccgttatacaatcgtgagaaatcttcgattaatagattgagcgtctgatgatcggaaataatatggtgcatatcaaatagtaaaatatatttgttccgatttctttctttcactactttaaaacgcatgagcggtgctgttccgatgtcaaacgggcgtacaaattgttccatgtcagcgtcactgtagctgtcggtctcttcatattccacttggtagaatacctcgtctgcaatgacttgatatgctccttcttcggtcattacaaaacttgttcgcagcgactcatgacgcttaatcagacgatctatggcttgttgtattttttctacatcaaggttacccgttacttctagcgctgacgccatgttatatgcagtactgttgccttccatctgatccagaataaacaatcgtttctgtgtagaggatgctggataagcttctctctgttctgcttgtggtattggactatattcgccttctcccgcggcctcaatctttctcgacaacatgacaggagttggtgaactaaatatctcttttactggcaaacgaatccctgtcttcttctcgatggcattaatggctgccgtcgcttttaacgaatgtcctcccagttcaaagaaactatcctctatgccgactggagatattcctaagatttcttcaaatatgtccgtaatgactttctctgttttagttcttggtggcatatattcctgtcctgctaatgcatttggttctggcagtgcttttgcatccagcttcccatttggagtcagtggcaaggcatcaatctgcatcataaagccaggtaacatatactcaggcagtttgtctctcaaatcatttttgatttcagacatatccagttgctgctcttgatttgtcgggattaggtaggcacatatactcttgtcaccgcctacttccaatgcaacaacggctacatcagatatacccggctgattccttagaacgctctcgatctcgtacaactcgatccgatatcctcggattttaacctgttcatctattcttcccaggtattccatctctccgttaggcagccatctcgccaaatctccagagcggtataacttcccttcgccatatggattgtcgataaacttctccgctgttaattcaggctggtttagatagcctttggctactccgtctcctgcgatgcatagctcaccaggaacgcctacaccacataactccatctcattcagtatatagagctgcatattggcaatgggatgtccgattcctacacttaaacccttatctttttcgctggaatagacatagtcacagcatcctacagtagtctctgtagggccatattcgttatggatcttgacgctttcacccaatagcttctgcgttttccacgccgtatctgtggtgaactcctctccaccgacaatcagcgtttctaaattcggcacatctacgc

SEQ ID NO: 14 - DNA, 2946 bp, Bacillus subtilis
ggctcatcgcatcctggggctgtagtcggtcccaagggttgggctgttcgcccattaaagcggtacgcgagctgggttcagaacgtcgtgagacagttcggtccctatccgtcgcgggcgcaggaaatttgagaggagctgtccttagtacgagaggaccgggatggacgcaccgctggtgtaccagttgttctgccaagggcatcgctgggtagctatgtgcggacgggataagtgctgaaagcatctaagcatgaagcccccctcaagatgagatttcccattccrcaaggaagtaagatccctgaaagatgatcaggttgataggtctgaggtggaagtgtggcgacacatggagctgacagatactaatcgatcgaggacttaaccaatttgaatgtatgcttactgttatctagttttgagagaacactctcaatggtttggtggcgatagcgaagaggtcacacccgttcccatgccgaacacggaagttaagctcttcagcgccgatggtagtcggggggttccccctgtgagagtaggacgccgccaagcttttttattttatctaccatgtttttgtttatgaagcttataatattccgcagtagctcagtggtagagctatcggctgttaaccgatcggtcgtaggttcgagtcctacctgcggagccattgcttccatagctcagcaggtagagcacttccatggtaaggaagaggtcagcggttcgagcccgcttggaagcttatctaaatacgttgatctgaagcagtttccgcatgttatggaactgttatttttttgttcagttcagtaaaaatctgttactgattgtaccagttaaggtataggtatttagcgcgtcttcagatgaagcctttcttcaagggtgcaaaagagattaacataattaattgttaatcggtattgacttttatcaaaaccttgatataattacttttgtcataatgaacagtatgctttagattattctgcgggttataccgtttggagttttactgaataaataacaatacagtttttgggttatctgatgctgtattctggctgtacattacatttttacttgcggaagtagttcagtggtagaacatcaccttgccaaggtgggggtcgcgggttcgaatcccgtcttccgctccattttatcccaacgggatattgtgaaattgattgcgcccgtagctcaattggatagagcgtttgactacggatcaaaaggttaggggttcgactcctctcgggcgcgccataatatatttaaaaatcgggaagtagctcagcttggtagagcacatggtttgggaccatggggtcgcaggttcgaatcctgtcttcccgaccattctcaaactttaaagataatatactggttttctttttttctctgttttaaaaaaatgcttgatttatagagagacaccgtggtatattattaaacgtcgctgatgaacagcagacaacaactaaaagcttcggaaacaacttgaaaaaagttgttgacataaaagaagctgagtggtaagataataaagctgcttcaacaagcggtaatgatctttgaaaactaaacaagacaaaacgtacctgttaattcaaagttttaaataaatcgcacagcgatgtgcgtagtcagtcaaactactttatcggagagtttgatcctggctcaggacgaacgctggcggcgtgcctaatacatgcaagtcgagcggacagatgggagcttgctccctgatgttagcggcggacgggtgagtaacacgtgggtaacctgcctgtaagactgggataactccgggaaaccggggctaataccggatggttgtctgaaccgcatggttcagacataaaaggtggcttcggctaccacttacagatggacccgcggcgcattagctagttggtgaggtaacggctcaccaaggcgacgatgcgtagccgacctgagagggtgatcggccacactgggactgagacacggcccagactcctacgggaggcagcagtagggaatcttccgcaatggacgaaagtctgacggagcaacgccgcgtgagtgatgaaggttttcggatcgtaaagctctgttgttagggaagaacaagtgccgttcaaatagggcggcaccttgacggtacctaaccagaaagccacggctaactacgtgccagcagccgcggtaatacgtaggtggcaagcgttgtccggaattattgggcgtaaagggctcgcaggcggtttcttaagtctgatgtgaaagcccccggctcaaccggggagggtcattggaaactggggaacttgagtgcagaagaggagagtggaattccacgtgtagcggtgaaatgcgtagagatgtggaggaacaccagtggcgaaggcgactctctggtctgtaactgacgctgaggagcgaaagcgtggggagcgaacaggattagataccctggtagtccacgccgtaaacgatgagtgctaagtgttagggggtttccgccccttagtgctgcagctaacgcattaagcactccgcctggggagtacggtcgcaagactgaaactcaaaggaattgacgggggcccgcacaagcggtggagcatgtggtttaattcgaagcaacgcgaagaaccttaccaggtcttgacatcctctgacaatcctagagataggacgtccccttcgggggcagagtgacaggtggtgcatggttgtcgtcagctcgtgtcgtgagatgttgggttaagtcccgcaacgagcgcaacccttgatcttagttgccagcattcagttgggcactctaaggtgactgccggtgacaaaccggaggaaggtggggatgacgtcaaatcatcaygccccttatgacctgggctacacacgtgctacaatggacagaacaaagggcagcgaaac

SEQ ID NO: 15 - DNA, 1499 bp, Bacillus subtilis
cgcatcgtcgccytggtgagccgttacctcaccaactagctaatgcgccgcgggtccatctgtaagtggtagccgaagccaccttttatgtctgaaccatgcggttcaaacaaccatccggtattagccccggtttcccggagttatcccagtcttacaggcaggttacccacgtgttactcacccgtccgccgctaacatcagggagcaagctcccatctgttcgctcgacttgcatgtattaggcacgccgccagcgttcgtcctgagccaggatcaaactctccgataaagtagtttgactgactacgcacatcgctgtgcgatttatttaaaactttgaattaacaggtacgttttgtcttgtttagttttcaaagatcattttgttcactttctcaagcaactttttaagtatataataagtttcttttaaagtcaacatattttttataaatggtggagcctagcgggatcgaaccgctgacctcctgcgtgcaaagcaggcgctctcccagctgagctaaggccccgaagtggtcgggaagacaggattcgaacctgcgaccccatggtcccaaaccatgtgctctaccaagctgagctacttcccgattttaaaaatattatggcgcgcccgagaggagtcgaacccctaaccttttgatccgtagtcaaacgctctatccaattgagctacgggcgcataataacgaatgccgagggccggacttgaaccggcacggtagtcacctaccgcaggattttaagtcctgtgtgtctgccaattccaccaccccggcgtggatggtatagttggagcggaagacgggattcgaacccgcgacccccaccttggcaaggtggtgttctaccactgaactacttccgcatacaggatagttatcctgtataatgcgggtgaagggacttgaacccccacgtcataagacactagatcctaagtctagcgcgtctgccaattccgccacacccgcgtaacatggtgagccatgaaggactcgaaccttcgaccctctgattaaaagtcagatgctctaccaactgagctaatggctctttttaaaagacttatgttattatcttgtccaaaaatggtgccggccagaggacttgaacccccaacctactgattacaagtcagttgctctaccaattgagctaggccggcaaatatggtggaggatgacgggctcgaaccgccgaccctctgcttgtaaggcagatgctctcccagctgagctaatcctccatatattacacttacgtgtaatggcttggcggcgtcctactctcacagggggaaacccccgactaccatcggcgctgaagagcttaacttccgtgttcggcatgggaacgggtgtgacctcttcgctatcgccaccaaaccattgagagtgttctctcaaaaccagataacagtaagcatacattcaaattggttaagtcctcgatcgattagtatctgtcagctc

SEQ ID NO: 16 - DNA, 1122 bp, Bacillus subtilis
ggcgtacggggaaggacgtcaatagtcacacagtccttgacggtataataaccaccatcatggcgaccatccaaaggataaacatcataggcagtcgggagggtagtcggaaccgaagaagactcaaagcgaaccaaacaggcaaaaaatttagggtcggcatcaaaagcaatatcagcaccaacagaaacaacctgattagcggcgttgacagatgtatccatctgaatgcaatgaagaaaaccaccattaccagcattaaccgtcaaactatcaaaatataacgttgacgatgtagctttaggtgtctgtaaaacaggtgccgaagaagctggagtaacagaagtgagaaccagcttatcagaaaaaaagtttgaattatggcgagaaataaaagtctgaaacatgattaaactcctaagcagaaaacctaccgcgcttcgcttggtcaacccctcagcggcaaaaattaaaatttttaccgcttcggcgttataacctcacactcaatcttttatcacgaagtcatgattgaatcgcgagtggtcggcagattgcgataaacggtcacattaaatttaacctgactattccactgcaacaactgaacggactggaaacactggtcataatcatggtggcgaataagtacgcgttcttgcaaatcaccagaaggcggttcctgaatgaatgggaagccttcaagaaggtgataagcaggagaaacatacgaaggcgcataacgataccactgaccctcagcaatcttaaacttcttagacgaatcaccagaacggaaaacatccttcatagaaatttcacgcggcggcaagttgccatacaaaacagggtcgccagcaatatcggtataagtcaaagcacctttagcgttaaggtactgaatctctttagtcgcagtaggcggaaaacgaacaagcgcaagagtaaacatagtgccatgctcaggaacaaagaaacgcggcacagaatgtttataggtctgttgaacacgaccagaaaactggcctaacgacgtttggtcagttccatcaacatcatagccagatgcccagagattagagcgcatgacaagtaaaggacggttgtcagcgtcataagagg

SEQ ID NO: 17 - DNA, 1071 bp, Bacillus subtilis
gttcatcagcaaacgcagaatcagcggtatggctcttctcatattggcgctactgcaaaggatatttctaatgtcgtcactgatgctgcttctggtgtggttgatatttttcatggtattgataaagctgttgccgatacttggaacaatttctggaaagacggtaaagctgatggtattggctctaatttgtctaggaaataaccgtcaggattgacaccctcccaattgtatgttttcatgcctccaaatcttggaggcttttttatggttcgttcttattacccttctgaatgtcacgctgattattttgactttgagcgtatcgaggctcttaaacctgctattgaggcttgtggcatttctactctttctcaatccccaatgcttggcttccataagcagatggataaccgcatcaagctcttggaagagattctgtcttttcgtatgcagggcgttgagttcgataatggtgatatgtatgttgacggccataaggctgcttctgacgttcgtgatgagtttgtatctgttactgagaagttaatggatgaattggcacaatgctacaatgtgctcccccaacttgatattaataacactatagaccaccgccccgaaggggacgaaaaatggtttttagagaacgagaagacggttacgcagttttgccgcaagctggctgctgaacgccctcttaaggatattcgcgatgagtataattaccccaaaaagaaaggtattaaggatgagtgttcaagattgctggaggcctccactatgaaatcgcgtagaggctttgctattcagcgtttgatgaatgcaatgcgacaggctcatgctgatggttggtttatcgtttttgacactctcacgttggctgacgaccgattagaggcgttttatgataatcccaatgctttgcgtgactattttcgtgatattggtcgtatggttcttgctgccgagggtcgcaaggctaatgattcacacgccgactgctatcagtatttttgtgtgcctgagtatggtacagctaatggccgtcttcatttccatgcggtgcac

SEQ ID NO: 18 - DNA, 1001 bp, Bacillus subtilis
aaagctaccagttatatggctgttggtttctatgtggctaaatacgttaacaaaaagtcagatatggaccttgctgctaaaggtctaggagctaaagaatggaacaactcactaaaaaccaagctgtcgctacttcccaagaagctgttcagaatcagaatgagccgcaacttcgggatgaaaatgctcacaatgacaaatctgtccacggagtgcttaatccaacttaccaagctgggttacgacgcgacgccgttcaaccagatattgaagcagaacgcaaaaagagagatgagattgaggctgggaaaagttactgtagccgacgttttggcggcgcaacctgtgacgacaaatctgctcaaatttatgcgcgcttcgataaaaatgattggcgtatccaacctgcagagttttatcgcttccatgacgcagaagttaacactttcggatatttctgatgagtcgaaaaattatcttgataaagcaggaattactactgcttgtttacgaattaaatcgaagtggactgctggcggaaaatgagaaaattcgacctatccttgcgcagctcgagaagctcttactttgcgacctttcgccatcaactaacgattctgtcaaaaactgacgcgttggatgaggagaagtggcttaatatgcttggcacgttcgtcaaggactggtttagatatgagtcacattttgttcatggtagagattctcttgttgacattttaaaagagcgtggattactatctgagtccgatgctgttcaaccactaataggtaagaaatcatgagtcaagttactgaacaatccgtacgtttccagaccgctttggcctctattaagctcattcaggcttctgccgttttggatttaaccgaagatgatttcgattttctgacgagtaacaaagtttggattgctactgaccgctctcgtgctcgtcgctgcgttgaggcttgcgtttatggtacgctggactttgtaggat
